United States Patent Application Publication US 2023/0390346 A1 - sequence listing, part 6

SEQ ID NO: 8 - DNA, 1000000 bp, Bacillus amyloliquefaciens
cctatgagcaatgcgacaacgcccactaggatgccaacccataaagtcattttatttcctccttcatgttgtctagtttaaagtgtactaaaccaaaggctattatacaacatttacatctctttttcctcgtttttagacaaaatttctttccctgaccggatttaaccacccgtagcgccgtgtcttgaaatccattgcaagaaaacaggggctgattttacgcagaatctcaaagaaaatcgtttccgcctcataatctcccgaagccgcaatctcaattaaactgtctttcatcatgaaggtggcgcggcccttttctccgggcagtgtaagccggtaaatggaatccaaacggctgtaactcattcggtttaaatgcagctggagccgctgatgcatatgtatcaccggaatcggttccgttatatattgaacttgcttttctgtcatttgatattcctggggtgtcagatctgtccaatgatagtctcgaaacaactcaaacatagccgtttcccgcccgaagtagtggttcgcaaactcatcctttatcaggtgcgtatagtaatgacgttccatttcctcatccccttttacagcgcttcgttattgctttctattatacaaaaggagaaaagaaagaattgtctattactgttacgccgccccttctatttttgtcgcataaacaggaaaaagaggatgatttgactcatcctcttttgtctcgttatttgtttagaagttttttcacgcggtcaactacgttttctgcagtaaacccgtattctttcataattgtttctcccggagctgaagcaccgaaacggtcaattgcgagaacgtctccttcaagaccggtaaatttgccccatccgaagcttgaacccatttcgatcgcaagacgtttcgtcacattcggaggaagcacgctgtttttgtactcagccgattgtttttcaaagcggtcccagctcggcatgctgactacagatacgtgaatgttttcttcagccagtttcgcttgagcttcgatcgcaagtccgacttcagagcctgtcgctaaaagaagggcgtccggtgaatcggtttttgctttggaaacggtataagcccctttttccacgcccgcatacgcttcttcagcctgctgatcaatcgtcggcaggttttggcgtgtcaatacaagagctgtcggatgatcttggctttgaacggcaaccttccatgcagctgcggtttcatttccgtcagcaggtctgatcacagaaaggttaggaagtgcgcgtaaagaagcaagctgctcaatcggttcgtgagtcggcccgtcttctcctacggcaatactgtcatgcgtgaatacataagtgacagggagtcccatcaatgatgccagacgaatggcaggtcttaaataatcagagaatacaaagaatgtgccgccgaatacgcggaggccgccgtgaagcgccattccgtttaatgcagcgcccatcgcaaattcacggacaccgaaccagaagtttttcccggcgtagtctttggccgtgaagtctcctccatttttgattgtcgttttatttgaacccgcaaggtcagcagatcccccgacaaagaaaggaattttcttggcgatcccgttcagtacctcacctgaagatgcgcgggaagcaaggctgctgcctttttcataaacgggaacttcctgatcccagtctttaggaagctcgcctttcatgccgagtgacagctgttcagcaagctcaggatatttttctttataagccgcgaacagttcattccattcctgttcttttttcgagccggcttcttttacagcttgattgaaatgcccgtatacttcttccggaacataaaaatcttcttcaaacgtccaagcatacgcttcttttgtcagcttgctctcttctagtcctaacggagcgccgtgaacgccggatgtgcccgcacggtttggagaaccgaaaccgatcgtggttttcacttcaatcaaagtcggttttttatcattctggcgcgctttttcaattgcagccgtcaattcagcgatgttgtttccgtcctcaacataaagaacttcccagttcattgcttcaaaacgctgctttacattttcagagaaagatcggtctaaatcgccgtctaaggaaatgtcattagaatcgtataatacgatcaggcggcctaattcaagatggcctgcaagagaagcggcttcggaagaaatgccttccattaaatcgccgtctccgcaaatactgtatgtataatgatcaactacgttgaatgaatcacggttatatgtctcagccagatggcgttctgcaattgccattcccactgccattgcaatcccctgtccaagcggcccggtcgttgcgtctactccggctgtatgcccgaactccggatgtcccggtgttttgcttccccattgacggaactgtttcaagtcttcaatgctgaggtcatatccgcttaaatgcagcatgctgtataaaagcattgaaccgtggcctgctgataaaacaaagcggtcgcggttaaaccagcccggattctgcggatttacattcataaatttcgtccacagcgtgtatgccatcggagcggctcccatcggcatgcccggatgtccggaattcgctttttcaattgcgtctatagatagtgtacgaatggtggcaactgatttcttttcaattgtatccattataatccccttccttattgttgtaccttttcatcataaagcgatgctgactttttctcaactctttcagcttaaatttgagataaacttgttgaaaattgtcgtaaagcacatcctgatattagtatatacgaaaaaagaatacgtattgccgtattctttctgtttagtgaagattatttttctgttgttctctttttaatttttcaggggtgacatcgttgccttccggatcaatcacttttacgctctttaacgtatttttcattgaggagcggaatcctttcaaatactcctggcgaagcttttgctgttcagctttttcctcatccgttattgtgtttgatttagctttttgagccaattcgttaattcttgcgattttttctttagaaatcataataagctcctttggtgcgtgttgattatatactactaaaacgcagtcttttttacaactgatgcgcgtcagctgccttctgtgtctgcggtatattcctgaaaccgccggtgaaccgtggctttggacacgtcatagccgaatcctcttaaggtcgctgcgatttctgcaaaggtaagcttgttggctctcagcctgataatttccgaaaccggaacctcttttttttcttttccgctgttttcatgtctgtttttcagattccgttcaggcttgtagccgtttttcacggctcttttcattccccgccggattttcatattgtgaattttcctctgatattcctcaacaatactgacgatttcaagtaccatcgaatcagcttcggaaagctccagttcacctttatgagccgtcgtatatattttaacgttctccctgtaaatacaatgcaaaagcgcaatcttggcgtttcctcttcccaatctcgtttcgtcctgcaccaatatcgcgtcaatatgtgattttttaatttcatcaagcatttcaaatactccgtcgcggtccatttcgtaaccgctggctttctcagaaatgactttcacgacttccatgccgtttgcagcagcgatctcactgagctcctcttcctgtctttttaatgacgtttgctgctgttctttgtttgtgcttacgcgggcataaatgagcgccttcatttctctctttcctctctaattgacaatggccagctgatatacggccggatgcttcttcttaaccggtagaataagttcgtctccgggctttatatcagcagtctggagatgattattctccgtcacccactcaatgaaatcttctttattaatgtgtttcttttctgctacatgatctgcaagtgaccagagtgtatcgccgtcctgaacctttattttaacatattggctgagggactgatcatttcccgcacatgaaacaagtaaaatagcggcacttaaaatcgcagtaaacagcccgacaaatatgatagattctttcgccatgtaaacaacctccgataagaatgtttgttcgctttttatatctttcagtatatacgaacaaatgtttctgtcaatcgtttttttcgaacctatgtttgtactgtcaggaaaatcatgctataatctacttaaaatcgacgttttgaggtgcgaaatatgacgaagctatcaaaaaggcagcttgatatcctgcgttttattaaagaagaggtaaaaacgaaaggatatccgccttctgtaagagagataggagaagcagtaggactggcttccagttcaaccgtgcacggccatttggcgcggctggagacaaaaggcctgatcagacgggaccctacgaaaccgagggcgattgaggtattggatgaagaagaagtccatattccgaaaagccaggtcgtaaacgttccggtcatcgggaaagtgacggcgggtattccgattacggctgttgaaaatatcgacgagtattttccgcttcctgaccggatggttcctccgggcgaacatgtctttatgttagaaatcatgggagaaagtatgattgacgccggcatttttgacaaagattacgtcattgtcaaacagcagaacacggccaataacggagaaatcgtcgtagctatgaccgaagatgatgaagcgacggtcaagcgcttctataaagaagacaattatgtgcggctgcagccggaaaatccgacgatggagccgattatcctgcaaaacgtaagcattttggggaaagtgatcggcgtattcagagccgtccattaattctattaaacttcatttatcgtaaaaaacccctctgtaaggggtttttttgcataaaaaaagcagattcgccctggcttaagaaacgaacctgctaaggaggaaaaacttacattcttattatccgacatcgcacttttgaagtcaactaataatgtttccctcgagaaacttttcattcatttttcaactttttatatatttgtgcgtgatgaatttgcttttttatcttttctttgggcgggcacgtcaaaaaatttatatatgaatatttagtacatagtgcaataagttaaatataaatataaaaaaacccgctgcctttagcgagtatctattttcaatcaaaatgataatattctacaccgtagaaccctttaatatagacgggaccacagacgtttgaagaactttcaaccagaatcctgtatttgtgatacggatcaattgattttttatcttgggcactgaggtttaaccagctgccgctgtagtttttagaacttaatgtataaaaatttccgttcagcgccatccgctggagtttcatgcttaaaccgcacgaagagttgttcattatggtgaacttatagcctaaaaagtaatcgtcggcagctacagcacccggattttcaatatgaaactcttttgcgtttccctccaaagtgaagcttgtttttgatccgaattcagtggtagccgctttagctgagtgtattccgctaaaacataataaaaaaacagcaatacatatccagtattttttcatttgcatccccctttttacatattttaacttgtgaatcctgtgatgtctattcacattttactttataaccactatatacctgtttaaaaatttgcggattgcttacaatgaagactaaacgaaataacgaaggtggttcaaatgaaacacgtaattgctttcgcttctaaaacggcgctcacacttgctttactgtacattgttctggatcttatgtaccaagtaacctttttaaacgttctgtttattacagtgatcttaagtttaatcacttattttgcgggtgattgcatgattctgccgagaacaagcaatttcacagccgttgcagctgatttcggaatttcattcattatattatggatattcctgatgaacattggcgggtttaatgtctctcctgccgcggcagcggttatctctgcactttgcatttctgtttttgaggcattttttcaccggtatttgcagcaatatgtacttcccgaagattataaggacacaacagagacggatagcacgctatggagctatcaaaccgaggcgtctgaagaattagtgccggaaaaagaccctcaggaaaaaacataaaaaggaggcaatcgcctcctcctctttttacttttgcttctgatcgtcaagcggcagctgcagcagtgagtctgtgcctgtcgctttcggcgtttttccgtcccatttttcaatccatttatatttgatcatttcatcggacattgatttcttaatgatttcgttatagtcagcgatcccttccgcttcaatttttttctttttcgcttcggcttcggctattttaatttcagtttgtgtccgttcaagttcctgtgaagacttcacccttgcatcgatggcttcctgtgtggctttatccggcttcggtacgccaagcgtcagatcatcaattaaaaatccgagactcttcatatcatcagcaaatctcttttgaacatcggccgcggcttcagcagatttttgcccgtatgtgtcaataaccgagtatttgctgattgattttcgcgccgcatcccacagccttgtttttaaatatgtattttcaatcgtttcgacgtctaccgccccgaatttgttaaacagatcgactactttatcaggctgcacgacatagttgtaagcgatatccatttctatatttttaccatcagaggttgccacttttatattttcattattcactgtctgcatacgcaccggatattccgttactttattaaataatccgactaagtgccagccttggtccaatgtgtcggattttaccccgccattcggtgagtatacaaccccgacataaccgttcggtattttttcaatgaatagtgacgctgtgacgcccgcaattaaaagggctgcacctataatcacaccgccgagaattttttttgtgtttccgcgcttattttcgctcatgctgatcttcttcctcccatgacttttttaattttttggctccgcttcccacttgtttaaagattggactaagcatcagccataaaccgaatccgatgatgacaagaagaatgatagacccgatcatcactttcatttgcccacctcttttctttcatcctgtcaattatgtatacgatcttaagaacttaaagtttcataaatttcaaaagaaaaagccccgccgacaaaataagcgtgcttattaataattgtcactgataaaatcagaaatcgtttttgtaaattggtaaaaggtcccgttttgtgcggatgctctgcttttcagcgtaaaggtgtcaaatagtgattttctgaagccggtgctcatttcgatttgaatactcaatccggatgaagattgattggcaaggttgttcggactgacgcctgcgtatttatcatttgtgccaagaagaacggcaggatacccgtgccgtttcagcacatcggtcaagagttcggcccgttctctgtctgtaccgccgatttttatctttttatcatcactgccgtaaccgtgcaatgaaatgacattagagtgccctttcaccatttgcacggccttggtttcatcgaaatgcgaacttgtcaaatgcagagctgcattaccggctgattttaacccttcaaataaatataaactccggttttcggcaatttctctggctaactcactggtccccggctctatgcctccgccgtgtatagctaatatgaggacagaagggtcatgctcccgcgttgaaatggaaaaatcggaaggatcttcattcagctttaattcctcgaaactgccgtaaagatctgaagcggcatcagcccgaaagaacggcagaagcaaaaacggtaaaattaaaattgaaattccttttttggttattgatggcatttgtatgtttatgttacaatacaaatgcttcagcctttgaagcgaacggcagaacagggtgactttggacggtttcttctgctctgcctctttgccggctgctttacggtctactcttctaaccctttttgccataacatcatcctttcttttgtttacacttttgtcacaatattatatacgttggacaaaacctccgttcatcttgaagaataaaaacatcaaaacaacctctatcctttagcctaaaaaagtctttctgttcaaagagacggaaagcttaaatgataaaaatgaaacccgtctccttagttttgtttgatttcccaattcaagaatccccgaaaaaatttgaatgtaactgctgtctccataaaaaaaagactgctgttaagcagtctttttttcgttttatttcgtgcctgttgatcccagtccgccgcggtcattgttcccgagcttgtctacttcgatcagctccacttcaggcattttcttcatgattctgaattggcatatccgctcccccttggaaatgtcggtatcccgaagcgcgaatgcaggaaaaaaccagaagtcattgtcgcctttataagattcatcaatgactcccattgaatttgtctgaatgatcccgaaatgcttatatgtacttgaacgcggaacgacatgggcctcgtatccttccggcagttccatcgcaactccaagcgggataagtttgaattcgccttttttgattgttatatgttcagctgcccgcagatcaatccaatcgccctgttcaattttactgattctcgtttgcgtatcatctgaatatttaattttgatttgtaaagtcatgttcgctgctccttttgcttccctatttcagtcgtattgatgaccaatccgtgccccattataccatttaactgataagaatgctgattttggtgtatatgcagccgaagaggaagcacggcgaagacaatgagaataaacctaaaatgaggacccctcctatcagtttttccctccattttcacatgacagcttcaattacaataatgcaaagctatatgtccgttcctttcaacagagcttttttaaaatttcgcctcggtttcaaaaggaatttcgttctgaataaagaatttgaagaataagcgcttaaagggcgcgcgattcttttctgtcccctgcctcaggcgcttatatcaaaagaaagaggtgtctttagaatggttcaatttaaaaactttcctgatccgtctttaaacgccccattgcagtctcgccctgcacagccctctgaattggagcatctcaaagcaaggatgcagaattttattaagcattccgcaacggatgataatcttgagatcgcagatgcccgggtgacggcggaaggaatggtcacctcacttttaaaagaacggcttgatacagaatacgaaatgcttatgaataaaatcacccgggaagtgaatgtggaggattacggagcggtccctgacggccgggacaatacagaagcctttcggaatgcgatcgggaacggccgggtcaaagtaaatgttcccgcaggagaatttttggttcaagggataaaactcccctcatggactactatttccggtgagggacaagggattaccgtgcttaagcttcatgaggacactcccgcatacgaatgggtcattactaacgatgattacgaaaatggaaaccgtaatatttttgtccagaacatgactttagactggaatcctgaccgtcaatgcggagtcaggaaccccggaggacagtgttccagctgtttaacgtttgctaatgtgcaatacggctggattaagaatgttgaaacggttaacgcgggtctgcatggtatagatattacatctccgacttacgatcatttgcctgaaacagaatggacgaaagacggctgccgttatatatggattgataactgtgtggcatacggcgccggagacgacggcattaccacccattacagcgaatatattttcatttccaactgccattccggaaacccccgcggcacagagcatgctgagggcagcgcaaactcgaacggcattgaaattgacgacggctctaaacatgtgtggcttttaaataactatacgagcggaaatatccgcgggattgaggtaaaggcgcacagcctgtggccggcttctcaaaatgttcatattatcggtcatgtttcgtatcgtgatgtacgttcatttgatattcgtcatatcggccatcatcaggcctcagaccccgaaagcacgacggcttatgatgttactttaaccgattgcaccgcgattgaaccggtattcaatgccctctatgacggtgtaaccccgagggcgctggtcatctctgcctataaaaacgttaatgtaaacggattcacagctattggtgatccctcatacgactatggcgggaatccagtcgtggctcttcaataccgcagtcaaaatattacgatcaacggcattaaaatacgcggctttacacaagccggggttgacatcaatatatccggcggatctaataaaaccgattatgttaaaattttaaattttgatatatacaagtcttctcctaaaggcatcacaatcggcggaggccaatataacgtaaatattatgaacggtacgatgatcggagacggcggttccgtcggaattacgtcccctaacagtcaggctgtcattctcggggtgcaagcggaaggttacagcgctgccgcatctataaaaggacagacttatgagcagatccccgtcaatttaaagggaggcgcacagctcgcgaccagctccggttttgcattcaacccgacaagcgccgttattgcgggaacaggcgatattacggccagaggtgacagaaatgcgatcatcagctcttccggaggttcaagttccgaaggttcaagggcatttatcgccgcttcaaacaatgtccatattacgggcggcaaagtctccagaacgattctgtcatcagaaagcattacattggaagaaccatacacggttgccggagggcatcagtccatcaaatggaaactggattcagcgggcggccacggtacgttcgccggagctgtcacctcttccctgtcagggtacggagaatattttgaaagtgtaaccggccagaagattcccgccgggacgatcgtcacagtgaaaggcgaaaaaattgaaccggctcacgtcggtgattatatgctcggcgtcatttcagaaacagccgcttttatctcaggagccgcaagcttcggatggcaaagccgctttttgacaaatgagttcggcggtttcatatacgaaaatgtgactgacgaagaaacaggagaaacagtacgcgtaccgaaacaaaacccggactgcagtccggctcttgaagctgactatgaagcacgcgcggccagagacgaatggcatattgtcggactcaacggccggcattacgtacgagtcgacagtacggtcagcccgggagattatatcacggctcataacggaatcgggactaaagccgcggaaggctggaaggtattgaaactgacggccttatacagcgctgaaaaagggtacggcattgcaattgcggttatcaaataggatctcaatatcaggatcatcttctctcttttctatcgggcgggtataatcctgttttttataccgaatgagatgcctctttttcagcataccgtttcatttgtccaagccatccatgctttctgtcatagaatactaccgtcagatgaaaaaaggaggaatatgagtatgagtatggacatgggtatggacatgggtatggatatgaacggacattatgatcaccagccaaagcagcctaaacaaaagaagaaaaagaagaaacaagataaaaagcatcttgattatgattacatcgttgtttataaaagaaaatgcaaaaaatgctgctgacttgacatatcaatactttttacacccggtaaatcccgggtgtttttcttattatgacgtttctccgggctattttcacccaaaatccggtcatcctatcacaatacataaaaagactctattattttcttcccttttcgcctgattaaaagtatttcatttacagaaaacaacataaatagaatgacatgacttttgagaaaatctgctctttgcttggtcaatttttctgcgataccatgaatttgcaacaattttaaaaaatttcctcaggaggtcatagacatgaaaatcgccagaacaatagtcggatcatgcttagctttatctctaacaattcctttcacagccagtgcctcagcagccagtcagtctgaacacccgaatgcgcctcacgtttcacccgttgcaaatccgttagaaagtaaattatcccaaacagcaggccaaaacgtaaaagcagcaggtgttgatgccgggctgaacgtaaacgtagatgttctcggaatcgcagatcgcatagctgaagcagttaagtcagatcaaaaccgaaccggctgggtaaaaaatgtcatggaaacaacattttacgcatcaggacagaagtacaacgtcatggtgttcaatttaaatcaagaatatgaagaccgctttaacggcgttcaattttacggatcagccgtttatgacggcattacttacggaatctgggtcttcgaagacggttcctttaataacaaaggagacgggggctggatcaattgggcattcagaggatggttcgatcgtgataatcagcatattgaattccacagaccttaattcagagaaaacttgcggcagcgcccgcaagtttttattttgataacgggatactgtacatttttcaccgttataacgactatacttgaagtgcgggctccgatcgcagccccggtaaagtctttcaaagtgagggtatgccatgtcaaagtctttaaaaatagtgttgtggagcatattggttttcattatcttgttagtgatgatcggaatcgtttcttacaatcaaactccgtctgcagaaagcgcagcaaaaagaatgctttacagcgtctaatcaattttaagccttcatcggctttttttatttaccgcagaacacttgaagttcttctgttagatcgttacgttcccattcggaatggagtatacgcgtatatcaccaggcagtccgttttgatacatggttccgattatgcctttcgcatcttttttctctattcctcatcacatccacttttttcatgctgctgctcttgaaaccaaccaatcatttcttcagcctgttccgttgaatcaaaaggttccaatcctaatagcgtgttacattttcatttttaaaaaaacaagccaactgcgcaccctcttcgcaacttctcaatgtatgagcctatccgtttctattacaggaagcagtacgattcctccttttactcattttaacggatggccatgtaaaggaaatatagactaagaaaccttttttcaaaaagtaaactagcatccctatcaaacttttcatttcggcatagtatgtattaatcctctttaggaggtgagattatatgggattctcaggtggttatggtagctcctttgcgttaatcgtggtgctattcattttattaatcatcgttggggcttctttcctcggcggttattaagaatcctcttacctccgcatccatgtcagcagcacctccatgatcgtacggcgccataaatgaaatgtttatggcgctctgctgtttttacccttttcattcacacattaaaactaaaaagatcggccgatgaacatgcagccgatcagtaattcatagattattgtgtaaggtttacatcgatgacgttatagaaggcattggaagtatccgcaacgtcccatacccccaaaatgacatgatacccgcttcgatcagtcggcacaaaaatcttatgagtcagattcgtatctgccttggaaccgtcgtggtttaccgttccgattaattcaaattcatctcttgacaaaggtttattcggattccagtttttcttggtgatataatagtgccactttgatgtcgcatgaggagctgtgtagtaccaagtaaaggtgttaaaaccgccgcggatgttttgttttacccaataatctgcagtctgcttgtctaaaccgaagtcaatttgtcccgatcccccatttgcagacgcaattcttccatccggcggacctgcagccggaaatcctttcggcccttctacagactgaggattatcaatgacggagccatatttctgcgcagcggccgtccagcccaatgtttgtttctctaaagctcccatgtacgctctgctgacgggctcttttatatacccgtgcgcagatgcatcacttgaatagaaagcgcctccaatcccaagagtaacagttaaaactgcagctttgaccaaacccttcattactgcatcatcctcccttttttgttaataaaatccctttcggtatatacacttcacgatagaggatgaaatgaccttccttttcttgataggaaaaagcaatgaggttcgcgctttcccctttgttttttataatcataaagaaaaagccgggccgattctgttgtcgaatccgcgattgccaaaaaccggcccgccccttatgctcagaacttcattcgctggatttgcgggtttcttttcggataaccggtgctacttccgctgctaatcgttcgatgttttccgcggcttttttaaacggcatacctcctatatcgatttgcgcgagaaatcgctgatgcccgaacaactcatattgatgcatgattttttcaatgatctgctgtgaacttcccacaaataaagctgtttcttttccggacgcccgctcaaaatctttcttcgttaaaggctcatcgatcccgtgatatgaatgaacgtgagaccagtaatttgaatgatacgggtaaaattcttgtattgcctgttcattcgtttttgaaatgaacatatgtccggtcacggcaaccttcacattttccggaggatgaccggctttagaagccgcttcccggtatttgtcaacaagcggcttagatgacatcggatcaccgctcagtacagccaatgccaaacccgcacctgcacgcccggctcgttctgcgctttccggagtccccgaaacacctaaccatagcggaatgcttccgcaaaaaggccgaggagaaatttctgcctcgcgcagcggcggccggtaacgtcctttccaggtaaccgattcttccccggaatttaattttaaaaaaaggtcaatgtgttcttcaaacagttctttataatggcctacgtcataaccgaaaagaggaaacgagtctaaaaatgcgccccgtcccgcaatgatttccgcccggccgtctgaaatcagatcaagcgttgcaaaatcctcaaataaacggacgggatctgcggtggataatacagtcgtggcactggtcagcttaatattttcagtaatctgtgaaatcgctgataagatggccggcggcgaagataccgcataatcaagacgatgatgctcgcctaccccgaatacatcaagccctgcgtcgtcagccagtttcgccagcttcatcaattcatctatccgctgctttgcgctgactgttttccctgtcagaggatcgggatataattctgcaaatgaataaattccaatttccatacaatcacggtgttcagccctcacatttctctcctcctgcactgtgtaaaaaagcttttatgttattctattcagccgttttataaataggaatttattcaaaataaatacagaagcttaacatgcagaaggccggtatgagaggaaaaaaagtttccggcgcccttcaattctgcccattatactcatgcagccggactaggcaagaacaaagccggcacaagcggattcgaattcatgtgttcgttttcagtccaattcaatccaatcgtgatattgatcataaagctttcctattcttccggcatcaagagcgatgacttcacaccctctgtcatcatatagaaagaaaataatatcttttgtcatattcacaaagaaaacatcgggatacccaacggaacagccccgaaccttggcttcagcggaaaatcttcgtggacggctgccttaagtaattggggaatacgcagatctttccgtttacataataaagaaaactgctgcatttcatattcttctgcatcatcttcttcaaacggacaggggcaggtcttcacctggatccgatataaatcatccttacacttcagaaacggctgataaacctttaattttctcggatgattaccttgagttttgtgcttatatacgttggcaacaaggaacatgtcatcgctatgttcaaacagttcattgaaaagtgcggcggtttgatgatgaacaagctgaaaatactcaagattcaaagcaccgctttcattaaattgatacatattgccgccgagagaaaaatgaagtcccacgtcccattgatgataaatgccgggcactaattttaaagtcggaaacctttccttcagataatcatttattttcattcaaacatctcactttccgtttcccgctccagagacagaagaagccgaaaacattccgcttatttctttttcacccttgtaatattattccgattggaatacaatgaaatagaacactgtgaaccccattgatcagggtggatgctggtcacattcatcctggtcctttcttttacacaagatcgcaccaactttgatcccctccgtttccaaccttatacatatatttcaatggtattattttcttatacataagcatcaagaggtgtcagctttgaacaacatcagaagatgaagagcatatttccggtctcaccgcaaaatgggtcttgactctgaactgcttttcacattttgattatcaagcgcttctttaaattcatcaaaatgaattgaacattgctgattcaaattacttcctgcaccttctgtcgctaaactgcaaaatgtccgtcacaatcatcctctctctaattttacaacattgctataatgattttcatgtttttcccaaccttcaagctgaatctttttgatcgttactaggtaacctaaatacaaaaaaacctgctttcagcagggttttttcggtaaaggggagattatttccccacaaattctattacctatgtttttgttttaaccattctttctttagcaatgcgtattggtaagtgttttcatatttaggtgttccatcctcgtgggcagtaaatgaaataaattcaagaaaataaccttctttacgcattcctaatctctcacatagtttttgtgacctgcagttatcatcttcaacatatgcataaagccttcttgcttctttttgcataaagagatactcaaagaaagccttcgcactttcacttgcgtatcccgccccttcaaaacgggcattgaaattccaacaaacggaataggtatctggctcttcttttaaataaaatagttctccgactagatcattactgtcttttaaacaaactgcaatataagagtcatctcggcttcttttttgaacatttacggcagcttcttctaacgtagatattctgtcatcaagaaaacaattcactctcggatgtgccgaatattccaacagaccttgtgcatctctctcggtaaaatttcttaaaattaagcgatgggtttcaattttttgcatttgcagtctcctgtttcattgttatcgacctttgaaaagaacttcttcgtttgttgaagaacttatcacaatctatttttactataatgatgggtgttatcatctttgtcaaaaacaataatcattcatttgccgcccgcaatgtaaagtactgaacaattttcgtgaaaaaccctcagtatcgaatataaaaacgagcaatagtaataaaacaaagttaagccattaaaagcttattgagtattttttcaaacttatttacgctcatcatctcatgagtgagaaatgtccccttataaaacatgctgaaagtcgtccaaactgccggggatttttgcgccatatcttttgacgttattctcagggcctgaaaatgaagtcctttcttttcagtcagttcctttaaatgctttaacactccgactgcaaatgggcattgagctgtataaaatattgtgattccctcatcattaacggaattacttttcacctgttttttaaatacaggaggatgtgcatgttcattccacgtcagtgacatcaactgaaaatagggttctgcttcatcttgcacagcaaatcccatatgctcgaagaaatgcttatcacttaaataagggagttttttcttccccactatatgaactatcccatccataccgcgggattttgcatctgacacacatttttctaacaagtgttttgcatgtccgttattcttatatttacctgagacccaaaggcaattaataaacataaaattaggtgcgcttaccgggacccacgcttcttctgcaggtaaatattcaataaaaactttggcccgttcgtttaggcggtagaacaccaagccatcactcatccgatctttgagccagctcttcttttcatttaccgcatcctcatattgtttcgtacctaacgcacagcaaatatgattgtcatcaatattgtccctggtcaactcaatgtattccatttttcctcacccgctttcttttggaaacatcagctttacttccgatgaacattgtaatttctcagaaatatagagtcccagtaccaatatatgaacgcagcagcaatgctcattatgtaataaatgaaacttctgaaaaccgtgaaatcaattgacggattacctatgtgccagaacaagaacacagctaaaaaagcgactgcggtataaatgaaaagatgaaccaaactaaactttttaggcttctttcttagccatagttgcacaggaacagcaaacaaaaagtaagtaatgaatgcgtaaaaagcaatgataactacagtaaccaatgcaattggcacaaaacccgagtatacaaacatatatagcccgaaaatcaaaccatacgacaaacttgaaaaagccaatgtgtaggtatagctctttaatcttgttgaattcagcttcaagtcaccgccccgttcatttacttcgcacttacaatatcgtagttttattgtctatttgtctgttttaatcactatttgacattcaattttataatctgtttctcctgtttcaatctttgtatcatcgcggttaactttatatttccctccatacaaacttgctgatatcgggtgccttataccactctttaactgatcgtaaatgtatttcttgccttcttgaaaattctttcgaggaacatgtcctactttgcaatcatttacatagacagctatagcttccggatcgtacttgttgttctcttctaaccgcaattcacaatttgagaaaaggaaattatgataaataaatatcggctcatcaaaagttgattctagaatctctttatttgtcataccatcatatttttcatcgaagaaaaagctgtcttcatcctcagtcttgatggctttcttaatatctttttgatagtgtgatgttcctgcaaccttaaagtctatatactcgaaaaatgcagacttttcttcatatttccttgagaagcctgtctcttgaatcaagattgggaaattttcttttttcgataccatctctgtttcgttattaacgccaacagtgttcatattattatttttattctcattttgttcatttttaactttgttcttgaaaaagttgagtatacccaaatgtacccctccatttgaaataaaagattggtttaatcaaaaaactcatcatcaataaaatcattttctcttgcaagtttattcgaatcctttttaaaaaacctttgcttcaatttttctttaactgttaatttttgtttttgtcctggcatatatgacatatataatctccgttgtttgataaatgaataagtaatttatcgacacctgaccttttgcagatacacatcctgtgctgaccatcactaaacgaaatatgaccgcaagcatttacgcttgcatatattcctgaatgttttttatgcatgtccggttttatgtagtgcgcagccaatcttctgcattttaatgcatattcatgctcttcgccttctaaagcattaaattccttatcagttaaatctaaggagcactttcctgttctaactttataacagtcatgtttacttagcctaaaataaaaagaatgtttcgtaggatttattaactgatccaacctgatccccttctctttaaaagaatgattttatgcaactccttaaaatttgtatttcgttacttttattgtaactttagtatactatgattacttttaattatcagtatacccataaaaaaggtcaaggaaataccttgactgtgtatcgctcaccaatctgcatccggctcatcgtgttcaaatccgtgaaatccacacatctccgcagccggctccttttgtgaccaataagtaatgatttctgtttgcatcaccattcaccttatcagccgcgctcaagttcaaatgatcacccgtgaaattcttttcactaagggtaaaatcatatcctgacggcgtaattctctgcagtgcaagtcaaatatctatagaaagattatgaccgcaaattcaaagcattctgtgcatttggagatgacaaacccccatttaaacacccttcggatgacaaatcatccgtagaatcctccctgcatagctccctcaatttttgtagagacacttgtccgcaaaaatgtaagggttttcaaaagaagagtcgtgtgctaaattgtaagataagtaaaaattttctgcgaatatttgaaaggggtgtatgatttgaaagcagtagtagcaacaaaagacaaaagtatagcgatcgtacaaaaagaattacgtcctttgcggcatggtgaagccaaagttaagatggaatactgcggtgtatgtcatactgacttgcatgttaaaaatgctgatttcggggatgttaccggcgtcactttaggtcatgagggaataggcattgtgactgagattggtgaaggcgtaacaagcctgaaaaagggcgaccgcgtctctattgcctggatgtttgaaagctgcggccgctgcgaatattgcttaacaggccgtgaaaccttgtgccgtgatgtaaaaaatgccggctatacagttgacggcgcaatggctgaagaagcaatcgtagcggtcgattacgcaataaaggtgccggaaaatttggatcctgcagcagcaagcagcattacttgtgcaggtgtaacaacttataaagcggttaaagtcagtgaaattaaaccaggtcaatggatcggtgtatttggagtcggcggtttaggcaacttggctgttcaatatgcaaaaaacgtctttaacgctaaagtgattgctttcgacattagcgatgaaaaattgaattttgctaagagcttaggcgctgatgcggttgtaaacagtttaaacgaagaccccgtcgctaaggcaaaagaagtgactaacgatttagggcttgatgctgtggtcatcacggctgtctctaaaacccctttcaatcaagcgattgatgttgtaaaagcaggagcccgtgtagtcgcagtcggtttaccggtggacaaaatggatttagatattccacgtcttgtgttagatggaattcaggtagtaggttcattagtaggtaccagagaagacctgaaggaagcttttcaatttgctgcggacggtaaagttgtacctaaagtgacaaaacgcccgatcgaagatgtgaatgatatttttgaagaaatggagcaaggtaaagtgaccggccgcatggttatcgattttacttcctaatcattaaggctgccgggaatgatacggcagcctttaatctctattcttgctcagcgccccacccagactgaataagactttgtcatttagttcagaaaagaaactttacagaccattcggcggacatacattttgcaagtactgcctggactaaccctgataccaatataattccaggtcattcattgccgaagcgtagctgttatgaggaaacccaccagaggttcctcataacactaaaaacctactcactgcactttttacagcagaccttatcagagtgtttgcttaacactttgtccattctacccacaggcatcttcttctcactcggaagtgtaagataagctgttatctcatcccctgattttaatgtttttccgcagatagagcattttaactcagtattaaagaaattttttaatcccattcagaagcctccttatttacctttataaagtaatacgttaatgctttataaaagtttcaggttaaagaaatactccttgtccgggaatttactttctttcagttgttacgtacccgcacagggttaacaatcgtcttgttctttaactcacagtgagaagatcgccttgtaaaacattagcgtaaaatcatcttcatgctttgaccagtttactgcagtgcatggattgttaatttgtgacacttatttgtcctctttaaatttttcttcttctctcaacttgaaaaagaaggaattattttataaatattgtaaatttatagctgtatcacattcactattaagaggaggaatacgaatgaaaaagaaaattattgccggcgctcttgcttttgggttaattccgctaatgggggctgcagatgtttctgcaaaatctttgccaaatcaagataaagtcatgaaacctgccggttggtcatgtgacgctccgtatattgcgtgtcagcctttttctggcggtaccggtaagatttcattcaactatcaaggcagctctccaggaaaaatcagagtttttgtagcgaatgacggcagcaaatctttcaaattcaccattaattatcctaatgggaatacactcttatcctctacgacactaaatgcggggaaaacgttcattcaagaattcagcgttaaccaaaaaggagaatacatcctgaaatatgatagcggcaccggtgatagtgtcgatggtttctttagatctgttgagatctaaattccgttaggaaagtcggcagttttgccgactttcttttccaagcattctgcaggaataaacgtaaagtgtcgaataaacatatgacctttttgaaacggaaactttatctgcaccacaaacccgcaagcagcctccttgtatcgtaccttccgtccctttgtgatttgttttgatttgtcgtatactgcgcttgcccgggaaatgatgaatattttcgttaactataatttccctgtacctcttcgtatgtggctctgcatgatgaagtaacgtcatggctcaccactttcatccacagttttattgcatgttgagccatatccctcctctttaaacagcaaaccgtcccatccatttctctctttccattatttcatattcttagaagctcttcattttagacttaatatccattttttcttatttagacttaaatctatgtcgaaatttatcgtccggcatattatgtactatcctaacaacaggaggtggcaataatatggggaactacggtggaaattacggtggaagttctttcgtattgatcgttgtgctgttcattttgttaatcattgtaggtgctgcattccttttctagcacattgacgatttatattcgtctcccaaacattgcatcccttagttcggacagacgccataagaagttttatggcgtttttactttttaaaaaaatctatctaagataaacattttttattttcactctggtaagcgggagagttttctcccctgcctgcgccaatattgccgctatgaagaataaggtgaacaattcaattcggaataaagacttgttcatgaacaaaacccctaaatagttgttaaaaaactaaggcgtttttaattcatcaggattacagaggttgtgaacttaaaaaggatattactcacctttataaaattgtcatcgttagatttagtcactgaatcttttttgtaagggtccgcccacaaaatgcggtgttcacacattaaatcattttcacataaaaaaaccggattcctcttctaaaaggttccggcttttctttttgttcggtatttgtcagttaatatgcaggaaatatctggtgacgtgcacacacccgctattataatatttcaatagagccttctgttccatgaacgcggattcgctgcccatcttttatcaattgggttgcattttcaactccaacaactgcaggtaagccgtattcacgcgcgataaccgctccatgggtcatcagtccgccaacttcagtgaccaggccttttatggacacaaacaatggtgtccagctgggatcagtataggggtaactaatatatccccatcttccaaatcggcatcttccatgtttaaaataacccgtgccctgccctctatgactcccgaggaaacgggcagcccggcaatcgctccggccgggagattttctcgtttgtactcgcctgtaacgatttcaccgtcagacgtgataacacgcggcggagatagtttttcatatactttgtactcgccttttcgtgtgctgatgatttggtaatccaatttatttgtgcgtacgacttcctgaagttcttcaaaagtgagatagtatatgtcttctttttcatgaataacccccgcttttgcgagttgttcggcttctttcagtaaagcctgcttataaacgaagtagcggctgatcatgccgtattttggatattctctgaatccgctgaagttccggatgatttggatcattcgtttagtttctctggctttttgttcaccgtccggtaattgcttcaatcggtctaataactcttgttctttcttcaacgcctcctgccgcccttgctcaaatttccgctggctggcatttggctcaaagtttttgagattattaagaatcatagggacaagtgcaattggtttttcgctccatcgagttcttgtgatatcaatttctccggcacatcgcattccgtacttgttgagataagcatagatagcgtcatgggtttcccgcccgccttcaaacttcaccagcccatccaaaaagtgatcatcttttacattctctaaataggcaattacttctggataaggacggatcacatcggcgacgtccaatagcgcaagccccatttctgaagtaatattatgaggtacagattgagaaagcgtatctgctgcgtttttttcacctaaccactcgttcattttttcgttaatccatgatgaagcatccattgcagttcgaatcagcaccgaactttttggattaaataaaatattctttaattcctggatatcttccaaaataaaacgaaataaatcagatcctgatttcgtctggatgttttgttttaactcttctatcgatgcctgactgctcttaatcaaatcagaaacaattgcaggatcgttttcagcttgatccggcatatctgcattgcctttgccgggaatcggcgccgttttatcatgtatcggtttaatgaaatcatctcgctctattatggtcataagtgcgtcttttaagagcggatcgtgctgccccataccttttaagaaaacttctctgacattaggggatgccagttgatgtgtgacatcgacaaatagccttccgccggctttacgcatgggtgcagcagtcgtcaacagaaaaaaagacaatccaaggggttttatgggatccgtcatcatttgctgatgaccgacagagatatagacgtgattttcttgatcgttcgcttcaggaacggggtataacgttgtgatcggacgactttggacaatataaaaagtatcgcggtccaaacaccattcgatatcttgcggctggccgaaatgagcttcgatctgtctcccgatacgtgccagctgtaaaatttgttcatcagtcagtgtttgaatcttttgctgatcaagatcgatctcccgtgtttccgttccgccttctcttcgttcatagacagccttttttttggtttctattctcttatcgacgatttgcccgtcctgtactttataacaatcggcagatactaagccggagaccagtgcttcaccaagtccaaaaccggcatcgatggacagcagctttcggtttccggtcatcggatcagcggtaaataaaatccccgaagcctgggggaacaccatcctttggatgataacagataaataaacttggctgtgatcaaacccattttgcatacggtaaatgaccgcgcgatccgtaaatagggacgcccaacatttactgatatgctgcaagatcgcatcgacgccggtaatatttaaataggtgtcttgttgaccggcaaaagaggcatgcggtaaatcctcagctgtcgcactagaacgtacggcataggcatgttcttcgccgaaccgggagagatggcaagcgactgctttgactacatctgaaggaatttctgcttccataatggtttgccggatttttttgctgacttcaccaatttgatcccgattctccgctttcagcatggtcagttgacccaacagcgcttgtaacgtttcgttttgttcaatggcttttcgatatccggcggttgtgacacaaaatccttccggtacttgtattccttgaatttttgataattcccctaaatgtaacccttttcctccaacgagcaaaggctgtgttttttcaatttcgtgaatgccgagaaccaaagaactcattctatatctccccttcaaaaaaatttgacaagagcttttcagcatgatataatcataatataagatggataactatgacttttaacacagaaagcgcgcgtgttctgattatatcaccgtgtctgtttttgtgcaatataaaaagaacctggccaatttggcgaggttctttcttcattttctaaggaaatcctgaagttgagtgatacctgtgaatccattgcagaaaggctatccccacggattcaagaaacaggaaaatctcaataataaaaaacatcccccacgcaatgtgaggggatgttttgtgtgtatacttctcatttcatcgtcatatgagtttagactgatgcagtcacaacttacaagaatgcttatctgtttccttcaatagtgttaacacatttgaagttatattagcgctgccgctgctttgatatccctaaactgtaatcgcttagtgtattgcgcgggagaaagaattgcattccatggtttattaatgccggctttctcatttgttaacagatttataaaaccaaggccattgataatgagtggccgtttattgttcttcctttgacctcctgaaaattaggtttgtctaaagctctttaaagctgtattgatatcttttgtgtgaacgtaaatgttcttatacaactcgaatagtgttttatatttttgaacattttgttcttttggataaaatgcagctgcttcatgaatgaactgctctgcacattcttcaagagagtcaaaccacccgcttccgaaggcagctaacatcgcagcccccatggccggaccttgttcattttctaacttaaccaccctcgtattgaaaatatcagcctgcatttgaagccacgtttcatttttagctcccccgccaatagagacaaccgtatcaactgattttcccgcttcgcggaatagctcaattgattcatataaagagaatgtgatgccttccattatcgccctcaaaaagtgctctcttttatgggctccgtccattccgatcaagcttccccgaatagatgaatcagcatgcggcgttctttcaccgactaagtaaggagtgtacagcagtccatttgctcctatcggaacagattccaccccccgcaataattgttcaaacgattcgttcggcgcaaacgttcttttaaaccagtccaagctgtaccctgcagcgagcgtgacccccatcgtataaaaagaatccttttttccatgattaaaaaagtgcactttccctttaaaatccctttctttgtcttcttcacaggaaagtatgactcctgacgtcccaatgctgcataacgtttttccggaagaaagaataccggctccgacagcaccgcaagcattatctgctcccccagcgtacacttttgttttttcgagcagccctgtcttcgccgcaacgctcggaagcagcgatcctacacagtcatgggattccacaagcggaggacaaatttctgctgaaataccaaattgattgcaaatctcatcgctccactctttgcgggtcatatgtaaaagtaacgttcccgccgcatcggagtattcggtgtgaatggcgccagtcatgcggaatctcacatagtctttcggaagcagaaaaacagcggttttgttaaaaagttcaggctcatgttccttcacccataacattttaggtaatgtaaacccttcaaggacacgatttttgtgatatcaagcagatgattgccaaatgtctcggttatcctgctgcattgaggcgtcgttctggtatcattccaaagaatcgcatgacgcagcacccgccgatcttggtcaagcagtactaatccatgcatttgtcctgaatagctaatcccgtcaatatccccggcttgaacgttggatatcgaaatcaattcagccaacgcttcaattgtttgctgcacccagtcttcaggattttgctcactatatcccgccttctcttggatgagcgggtaacttttggacgtttctgcacaaaccttgccgttttgattgactaaaatggttttaacagcactcgttccaaggtctattccaatgacatacttcattttttcactccttcctctctaaatagatttccgttgaaatgacccgccataacagtaacttcatgacgggcaattccgggaacttggctgcctgcatcttttatgcgggatctggagcttcttttttcatttggttatacctgtaaaatgtattggtttaatatcgcttttagccgttcctgtctccctgattcgtttttaattggctgattgttcagcgcatattgctcaagtgtcttaaaatcagctcttccttctgcaatttcaagaccaatcccttcagtaaagctgcggtaacggtgttgaatcacatcttcaaacacacgatcttcgattaatttgtgggcggctttcaaccctcttgcaaatgtatccatccctgcaacatgggcatatagtaaatcatcaggctcaaaagaagatctcctgacctttgcgtcaaagtttaatcccccgcttccaagaccgccattttgcaggatttcgtacattgctaatgtcgcagaatataaatctgtcggaaattcatctgtgtcccatcctaaaagcggatcaccctgattcgcgtcaacagagccgagaaggccatgcactctcgccatgcgtaattcatgttcgaatgtatgcccggctaatgtggcatgattggcttcgagatttaatttaaaatgattgtctaagccgtattgctttaaaaaggcaatggttgttgctgcgtccgtatcatattgatgggtggtcggctcttttggttttggttcaatcaaaaactgccctgtatacccgatttccttcgcataatccactgccatatgcataaatctggccatattatcaagctcaaattttaaatcggtatttaacaaagtttcgtacccttcacgtccgccccaaaatacatagttctcggcgccaagctcttttgctgtttctaatcctttttttacttgggctgcggcatacgcaaatacatctgcattacaagaagtcgccgcaccatggacgaaacggggattcgtaaacatgtttgcagtattccataataacttaacgccgctggttctcatgtagtcttttatcatgtccacgattatatccagattttgatttgtctcttttaacgtacttccttccggtgcgatatcccggtcatgaaaagcaaaaaatggcgcatccagtttttcaaacagctcaaacgctgcatctaccctcgctctcgccagatccatgcctttatagtgatcccacggtctctgcatcgtagctgcgccaaaaatgtctgtgccgtcagcggtaaatgtatgccaataggcaatagaaaatcgcagatgctctttcatcgtttttccgccaattacttcttgagaattatagtatttaaatgctaaaggattcgtggattctttcccttcgtaaatcactttgtttacgctttcaaaatagttgactgaaccggaatgagagtgagccatgtgtgatttcccccttaaaaataaattctaaacttgatgattcgaatacagatgattttatgtcatgttatatattagtttgttgcctaaacaaactaacttattttcatcttatataacctcatcagtattttcaatattttttttagttttttacgaacacattagatataataaaggttggattcgctatgtactgcgtttcgcacgataacacagaacgttcaacttaatttaaagattatacaaacggagtggatgaagtggatatcgctgatcaagcctttgtcaaaaaagttaaccaaaagttattactaaacgaaatacttaagaattctcctatttcaagagcaaaattatctgaaatgaccggattaaataaatcaactgtttcatcacaggtaaacacattaatgaaagaaaatcttgtatttgaaatcggtcagggacaatcaagcggcggcagaagacctgtcatgcttgtttttaatagaaaagcaggatactccgtaggaatagatgtcggcgtggattatgttaatggcattttaacagatcttgaagggacgatcgtccttgatcaacaccaccatttggaatgcagctctcctgaaataacgaaagatattttaattgagatgattcttcactttattgcaaatatgccgcaatctccgtacgggcttattggtataggcatatgcgttcccgggttaattgataaaaatcaaaaaattgttttcgctccgaactccaactggagagatattgacttaaaatctttcatccaaaagaagttcaatgtgcccgtttttattgaaaatgaggcaaatgccggcgcatatggagaaaaagtatttggtgctgccaaaaatcacgataacatgatttatgcaagtatcggtacagggataggaatcggcgttattataaacaatgatttatacagaggggtaagcggattctctggagaaatgggacatatgacaatagactttaatggtccgaaatgcagctgcggaaaccgaggctgctgggaattgtatgcttccgaaaaggctttattaacatctcttcagacaaaagagaaaaaagtgtccactcaagatatcatagacctcgcccatctgaatgatattggaactttacatgcattacagaattttggattctatttagggataggcctgaccaatattttaaatacatttaatccgcaagccatcattttaagaaacagcatcatcgaatcgcatcctatagttttacattcaattaaaagcgaagtatcgtccagggtttattcccacctagacaatagctatgaattattaccatctatcctaggaaaaaacgcaccggcattgggaatgtcctctattgtgattgatcattttctcgacatggttcataactgaaatgtacaaacttctatgttttacgctcatctttaaagatgggttttttgttttgttattttcatcctgaatgggagcatttctgacgtgtttttccacacgggcattttctaatatgaaaaaggagttccaaaatagaaagctcctttttcatgcggacattcatttttctttataacggaaatatctgaagtcggccggaatatgatttccgctcgtatcttggcattgcatccctacaaaagctcctgtaaagaatcccccgccgcggatgtaatcatctgataatttttttgattccaatgcaatatcgattttgtaccaatcttctttgttaaatgaatagaaataataatatttttcgttttcaatattcacttttaaatagacgtacttgacttcacgaggaatcacaattttattttttaacggttgtgaaaaagagaagttatcacatatcgttaattcaagaatacggccaagttcttcatcatgcgtgacttgaagagccgtccagttctctgtattgtaatagttcaccaaaccagcggcttgctgaaaattttccggataaaacgcaacagccgtttccgcttcaaaatggagactttgccagcgtctggctacaaatgcctgagtaaatgtcgaagttaaggattcatggccgtataatcgtaaatgatttggcgcttgagttaatgaacctaatttctccgtaaaagggattcttaacgtttgaaaattaatatttaatgtcgcatcctcaaattcatcaacttccggatacgtgtcttcaaatatggtttcaggtatagaagacgcatccacctccaagctcccttcttttccgccttctacataaggccagccatctttccaatagagcttttgaatagctgtttctctgcccaaaggacaatatcctcgctgctgaaaaattgaatcatcgtccgggtgaatgggacgtcccgttaaatgagctaaataccactcgcctgtatgtgtgtgaacaatggatgcatgcccgcatttttgcaatgggtttcctggatcatgccatgacgttaagattggattatcgggatgaacttcatatggccctcgatatttgcagaacgggcaattgtagcagcgtgttcgaaccgcgttcctccttctgcggttaataaataataatagttcccgatatgataaaggtgcggcgcttccgtcagctttctttcagttcctttaaatatcactttcggtttaccgatcagtttttgctccttatcagaatattcctgcatgacaatgcctccaaaggagtgccgatcaatacgctgatcccataacatatttaataaatatttttttccatccgtatcatggaacaaagaagcatcaaaccccgagctgtttaatgtgatcggctccccccaatcaccatcaatcgtgtcacaagtcactaaataattgtggcaatctttccaagcgccatctacgaccttaacatccgtatagatcagccaaaactttccgtcgctgtaacttaaacatggcgcccagaccccgcctgaattaggatttcctttcatgtctaattgcgaaactctctgtaatggatgtgcaactaagtgccaattgactaaatcttttgaatggtgtatctggactcccggaaaccactcaaatgtagatacagcgatataataatcctctcccactctgcaaatactcggatcggggttgaatcctttaagtactggattgataatcttcatgcagaacgcctcctcagctattttctgttgactatcatgttttaagctttgaaatcgtcaatatgatccaaataaactttgtctctattctctaattctcgaaccatgtttttatattttttctcatctaagttatagaaattaatatcaatcatggccagaaccagtaagaacacgggaataatggttgctgtaattaaaattcccgtcaatgcctccggcgtttgcgcctgatttgccacatatccaaactgatctagaaccaaacccggtacaacccctcccaaggccatgccgaatttaaagaaaaatccgataatagcgtatatgagaccgcccattcttttcccggtcttatactctccatattcgattgtttcaggaataagcgcccacatatatcccccggcagtgagacttcctgcagcggccagcaatcgaaaggaaagtatcaggaatacattacttggcggaacaaacagtaaagctaagaggccgatcatattcagtaataatgcatagtttagtaatttcttcttccctaataattgatgaagctttggaataaacggtaaaatgaccaaagcaggcaaacttcccaacaaaccgtaccacttcactaaatccgctctttctaaattatacgttacgtaatagatgccaaccgaattactgattgaattcactccaaaaataataataaaaaaatacttagtacaactagaggccgattaacacgaaattgctcaaatatatccgataatttaattttttcttcagatttttgaagcgtgacacgctcttttgtgcttttaaaacaaaagattaaaaggcacccgcctataactcccataatacccatggttagctgccagccaagagattcgctgccggacgtatcgcttaaataagcagccagtaagggaacaaaaaatgcaacgacaagtccccaagattcgcaaataacatacggacagacgttatactaacaacttcttgattatttcgggtcattgcagaggttaacgcgccatatggcacgtttatcattgtgtatgtaagcgataaaccgacataggtgatataggcatatattaatttcccaatatccgaaaaatccggggttgtaaaacagagtattgccagtatgacaaatggaaaagctccgaataaaagatacggtctgaagcgtccaaacctgctatttgttctgtctactatcgttccaataaaaggatcagcgagagcgtcgatgattctaaccactaaaaacatcgtaccggctgttgctgccggtaaaccaaatatatctgtatagaagaacaaaagataagtagacactgttgcataaattaaattacatgcaaaatctccagacgcatatccaactttttcaaccatgctgatcttctttacattttcactgagcatgatttcctccccttttcgatcctttacataaggaacatgatgaatggtataacatttcttcaattttatcggccagtgaggtctttataaaagcgctttcaaaaaatgatagcagtttactttcacagagcactttcatcgtagtgaacaggataaaagcttggctttcgttttatatatacctccaattaaatcgagcctcttatccccttccatttaagacctttacatgaaggacaattaaagcggtttattagtttgttgatcgaacaaactaacttgatttcatattataaaatcttttctgctttttcaactcttttttcagaaaatttaaaaccgatcaaaggacataccatgttgtaattgccggctccttcgacagacgttaagtaaaaaccctatgtgtcacctgactgatttattaaatgataagcacttccatcatcttttgtttagaaaaacttattaagaaacatgcacttgaaaaaatgcgaatcatatataagtgatatcccgtttaattggttgaggaggatattatgaaacctatgctgccttttgaaaaatattttggtgatttagaactggtttatgcattttatggagctatgcctaccggtgttactgtctcagaaaccggtcgtatattcatttgttttccgaaatggggagacgatgttaaatttacggcagcggaaataattggagataaattgcagccttatcctgattcacaaaccaatttggttaactttgagaatatcaaaatgactttcatcagtgtccaaagtgtagttgctgatggaagaggaacgctttggatactagatacagcggcgcccaatttttctgaaccaattaaaggcggggcaaaattagtcgctgttgatttaaaaaccaatacaatcagaagagtgtatacctttacagaagatgttgtccttccaacaacctacctgaatgatgtccgatttgattttcgtgtcggaactgcaggttatgcctatataacggattcttcttccaaaggaccaggagctattatcgtcgttgatttagaaaccggaaacgcatttagacggttaaatggagcaaatccaacttcaccggattcctcttttataccgaaagtagaaggcaaaattttgatgaatcgtaacaaggatggttcaacttccccatttaggctggcatccgacggtattgcgatctctcccgacggaaaggtattatttttttgtcccctgaccagccgccatttgttctctatctcaacagaagccctgagagatagaaatatatcggacatggatttactttatcatgtggcgtattggggagaaaaaggcgcgtctgatggaatgattacagatgcaaaaggagccgtttatgccggagattacgagaacaatagtattcgaaagatgctgccgaatggcacaatggaaaccatcgcacatgatccgagaattttatggccggatactttttcgattggtccggatggatacttatacgtcatcgtgaaccaattacatcggcaggctagttttcattatggagaagacttacgacagaaaccttatagtttacttcgtatcaaaattgatgaatttcctgctcctgctttttgaaaataaaaatggccggttcaattttagagcataattggcttcatttagcctccatcctaaaccgaataagggattacaataaatacgtgtcctcaattatggagttagattcataacttcattttttttggtcaaggaccaaaatatcgacctcttaaccttttgaccaaaacttaaaaaatcccctgacaccaatagtgccaagggattgagagattaatactgagacatgtattgttcgcgctcccacggatgaacctgtgtgcggaacatatcccattcgatttcttttgcttcaatgaagtgttcgaacaggtgctcgccgagcgctgcaaccatgacttcgtttgatttgaattcgtcgagagcttccgccagtgtcgccggaagatctacgatgccgttttccatgcgctcttctttgctcatgacgtagatgttgcggtcaatcggagccggtgcttcaagtttgtttttgattccgtcaaggcctgctgcaagcaatacgcttaacgccaggtacgggtttgccgccgggtctacgctgcggacttcaacacgcgtgctgatgccgcgggaagccgggatacggatcagcgggcttctgttttgcgcgctccatgccacgtagcaaggtgcttcatagcccggaacaaggcgtttgtaagagttcactgtcgggtttgtgacagccgtaaagcttgtcgcgtgttttacgataccggcaatgaaatgttttgctgtttcactcagctgaagatcagcgtctttatcaaagaatgcgttaacgttatctttaaagagtgataggttgcagtgcataccggaaccgtttacgccgaacagcggttttggcatgaatgtcgcatgcagaccgtgtttgcgggcgatcgttttgacaaccagtttgaaagtttggatgtcgtcacaagaacggatggcaccggcatatttaaaatcgatttcgtgctgaccaggagcaacttcatggtgagatgcttcgatttcaaagcccatttcttcaagctcaagcacgatatcgcggcggcagttttctcccaagtcagtcggagccaggtcgaagtatccgcctttatcgttcaattcaagcgtcggttcgcctttttcatctaatttaaacaggaagaattcaggctcaggtccaagattgaaatcgctgaaaccgagttctttcatttctttcagaatccgtttgaggttgttacgcgggtcaccttcgaacggcgtgccgtccggattgtaaatgtcacagatgaagcgtgctactttacctttttcagccgtccacgggaagattacaaatgtgttcagatcaggatataagtacatatcagactcttcgatacggacgaaaccttcgatggaagaaccgtcgaacatgcatttattatcaagtgctttttcaagctggctcacaggaatttccacgtttttaatcgttccgagaatgtctgtgaattgaaggcggatatactttacgttttcctcgtttactaattttacgatgtcttctcttgtgtactttgccatttcgtaaaactcctcctctaaaaggtaaatgtatatagcaaaacagttgctaacggattaatgaaagaatcgggacatgtcaccttggcggaaagtatttccccgctggaaacggcctgcctgcatcagttcgtttttcagaagctttctgagttcgtcatcagacagattgtgtttcatcggtttggcggttttttcggatttttcttccggttcggcagatgccttatccagaatttgtttgatccccgccatattgacgccttgttcaatcagatttttgatttctaacagtttatctacatcatggaatgaaaataatcgtctatttccttcgcttctcgctggaaatatcaatccattttcctcataatatcgaatttgccgggcagaaagttctgttaactgcatgacaatcccaattggaaataaaggcattgagcggcgaatgttatcactcatctcaatttcctccttttcttatcttagtctcattataggtgatgttatattttgtgtcaacacaatgtaaggaatcttaacatcaaattctttgaaaattgcaaacgccctaaatcagctctttttccattaaagcatttacggcgctgcaaatcgcatttttcacgtgcgcgtaggttaatcctccttggacatacgcgacataaggcggtctgataggtccatctgctgataattcaatgcttgctccctgtacgaaagtgcccgctgccataatgacatcgtcttcatatcccggcatatagctcggataaggcgtcacatgcgcattaatcggtgatgcatattgtatcgcctggcaaaaagcgatcatcttatcagggtcctgaaactcaactgattgaatcagatccgttctcggcgcattccatgcagggtttgacgtaaagccgagcttttcaagaaaacgggcggtaaataccgctcccttcaagctttgcgccactacatgcggagcgagaaagaaaccttgatacatttcctgcagtgaataaagcgaagcaccggcctcacttccgattcccggggaggtcatccggtaagagcaggcctcaatccacttggctttccctacaagatagccgcccgttttagcaaggccgccgcccgggtttttaatcagggagccggccataagatccgctccgacgtggcagggttcccgctcttctgcaaattctccgtagcaattgtccacaaaaacaatgacatcctctttgatttcctttacgaaacgaatcatctcttcaatttcatttattctgaaagatggacgattcgcatatccttttgaacgctggatgccgatcacttttgtattcggccggattgcagcccggactgcttcaaagtccactctgccttctgatgttaaatcgactgcattgtatccgatttgaaattccttaagcgagcctgaatactccccgcctcttactccgacgatttcctcgagtgtatcgtaaggcttgcctgtgatataaagcaattcgtccccgggtctcagcacgccgaagagcgcgattgaaatcgcatgcgtaccggaaatgatttgcggccgcacaagtccctcctctcctccgaacacatcagcatagatcttctccagtgtatcccgtccgatatcatcataaccgtatccggttgaaggcgtaaaatgcgtatcgcttactttatgttttctgtagctttgcaggactctccattcattccgttcactgatttcttctattcttttatgaacggcggagatttccgcttctgtttcttcggcggttttttgtaaaagagcgccgtgggtcagtgtgtcaaacatgttgtgtataccttccttacatgaatttcttcaattctccgagtatgctttgttcttcctgtacataacctgagacttcgtagcgttcattttcttcattaaaataaaggctgtcgatcatggtctctgatttgatgcgtgacatcaatttgccttcggcggcaggcacatgaacttcatacggtgtcatcagctcccggcgcaaataagcttcgatttccgcttttagtttcgcttcatccccggcgattcgggcgctgatcatgatgtggccttctcccgctgtcgggatgaagtcaggaagtgtctcatcacgtttgttataagcggtcagcaccggaatatcatctgcctcaagctcttttaacagtccgaggacagtctgttcatgcccggcataatcttcattggatgaatcaatgacatgaatgatcaagtctgcttccttcacttcctcaagcgttgaacggaaagcggcaatcagcgtcgtcggcagatcctgaatgaagccgaccgtatcagacaaaaggacgctgtagccgcttgggagcgccatctttctcgtcatcggatcaagtgttgcaaacagcagatcttcttcatagctgtctgagcttgttaattgattgaaccacgttgattttcctgcattggtataaccgacgagtgcagcctgaagcacgccgttctttttgcgtctctcccgataacggcttctgtggcggataaccgttgacagctgcacgttaatttcgtgtatgcggtttctaatgtggcgccggtctgtttcaagctttgtctcaccgggccctctcgtcccgattccgccgccttgtcttgagagattgattccttgtccgctcagacgcggcagcgcgtattgaagctgggccaattcgatctgaagctttccttctctcgtcttcgccctttttgcgaatatatccaaaataagctgcgtgcggtcgatgatcttcgcttcaattgcagtggcgagtgatttaagctggctcggtgacagttcatcattaaaaataaccagatccgcttcaagctcttcacacagcgccttcagctcgtctactttccccttgcctatgtatgtagcggcatccgctctgttccgtttttgcgtaatccgggtcagcaccgttccgtcagccgtttttgtcaatgaagcaagctcttccatggaatgttcaaagtgctcatctgtcatgtgcggaagctggcagccgaccaaaatgaccgtttctttttttccttcctgttcgttcaaatggatgttcctttctgtgtcgtattgggcagtagtactatcataccaaacccgcagggcgtataccacacatccggcgggttttaaagagagaaataaaaaagagacccctcaaaccggctgagaggtctattcgtgagctgccgcctcatcttttataagtaaatcctggctcttgatcgtcattaaatcgtttttcaagtattggtctcccattaaaagtctcatggcctgagcgcggatcgatttttcaatcacgtttctgacaaagcgcccgttgctgaatttaatggggcttgtcgtgcttttcactgtcattaagtaatcttttaacttccactcggcttcctggcttaattgatactcccgctctgctatcatgcgctttgcgatgtccatcagctgagtgacagagtaatccggaaaatcgatgctgatagggaagcgcgattgcagaccgggatttaatgacaggaaatgtgtcatttctctcgagtaccctgccaggatcagaataaattcatgctgtttgtcttccatatgtttgacaagcgtatcaatcgcctctttaccgaaatccttttctccgcctcttgcaagtgagtatgcttcatcaatgaataaaatgcccccaagcgattttttaatcagatctctcgttttttgcgccgtgtgtccgatgtattcaccgacgagatcggcacgttccgcttcgatcagatgtcctttggaaagaacgttcatctcgaagaaaagcttgccgatcagtctcgcgacggtggttttcccggtgccggggttccctttgaacatcatatgaagagcttgttttccgactttcagcccttgttcggcccgtttttggttgacgaatatccacgcgtaaatttctttaatgttgcgtttcatttcttccatacccactaatgtgttcatttctttttcaatttctttcagaatgctgtgcttggcttcatttttttgcagggcggcctgatattccgcctcagcttctgcatttgtcagcacttgcttttggccattaagaatgatgttaatttgtccgttatttttataggttacagcgcgctccaacatgctcacctctctgttctctctttatcttactcatgatgaagcggttctgtgacatccgcctatcatcatgaggcccgttttcctctttatctgtcactttttccgttctcttcgggaatgatgttgaatcctgcgctttcccgagaaatatttttcatttcttattgtattcagcaaaaacgggaggacaaaccatttatttttattttccgggaaatgttgggtgtatttctcatttttttcatgaatgacagccgtacaagcaccttttgaatatcatcatatgctgtaatgaggtgatggagaatggttaaaatttttatagaccccggtcatggcggaactgattcaggtgcaaccggaaacggacttcaggaaaaagcggtcacgctggagatcgcactggctttgcgcacgattctgacgaatgagtatgaaggagtttctgtcacgatgagcaggacaagcgataagacggtcagcctgacggaaagaacggatgccgccaacagctggggcgcagattattttttatccattcatattaactcaggaggcggaaccggattcgaaagctatatttaccccggtgtcggagcgccgacctcgacttaccaatcagccgtccacacgcaagtaattcaagcatcgggttttaatgaccgcggaaaaaaaacagccaacttccatgtgctgcgggagacaaggatgccggcgattttgacggagaatggttttgttgatacgtcagctgatgcaaacaaactgaaaacagccagttttattgaaagccttgcaagaggacatgccaagggcttggagcaagctttcggtctaaaaaaaaaggctgacttatataaagtgcaaatcggcgcattcaacgtgaaagcaaatgctgatgcgcttgccgccgatgcggtgtctaaaggttttgacgcgattgtgcttccaaaaggcggcttatttaaagtgcagatcggcgcattctctttcagagattatgctgaagcgttggcagcgcgggccgaaaaagccggatttgatgccttcattgtgcaagactaaatgaaaaaacccctgctctccctttttgggacgaacgggggttttttgttattgaagtatatcggcgacaaaccgagaccaagcttcaagacgatgatacacattttcctctttcagttcgctcagtttcatccagcgcccggcgatttgatctttttctttcacttcgacttgtgctgcaggcgctaactggagcgcagaaaggatgccgatatgcaccttccctacatcgttttcatcatcattgatcaggccgagtgtgacaatgttttgtttgtcctcctcgcgaatgtacaattcttccgccagctcccggtcggtgttctgtttcagcacttccaaaaatgaagccgccccttccatagggttcatgtgtccgccgaagccgagagaaagcttattatggaggcgcgattcccctccgcccgcgagccgttcatacacaaatacctcatcatcgcggcggatgacgacatacggaatcggctgtttaaatcgcgggtcctcttccgcgtcgcctcttctgatttcaaaaaaatgcgcctcaatttgagccataatttttatgatacgttcatcctcgctgttgactccctgaaatgtcagcatttcgttttgaaagacgtcactccgcggtgcagccaagatgatttcatccattttattcatgcccgttcctcctgtcttacctctccactcaagccaaaagagcagatattatatctgctcttcatcttggccaaaataaaaatcttcgtccttaatcggttctaccgtcgcctttttgtagccgttccctttcatggagaagaaatcatgtgattttgttttggtgtttaatccgtttaatacaatcggattaatatcctcttcttcaaagtaaggatcgaaccctaagttcatcaaagctttattggcgttatagcggatgaatttctttacgtcatgagacagcccgacttggtcgtagagatcctctgtatattcaagctcattgtgataaagctcttctaaaagctcaaccgcaaattcgcgaagttccgcttttttcgcttctgtttgtttattgaatatttcctgggccagcagtccgacatatacaccgtggatcgcttcatcacgaagaatcaggttgatgatctcaccgctttgcatcagttttccctgtccgtaaaaatataacggataatagaaaccgctgtaaaaaaggaagctttccagatagacagaagcaaccatcgctttgaacagtgaaatttcatcatctttttgaatggctttgtaaagcccgacaatcatttgcgcttttttctgcagatatttattctgctttacccattcaaatacttcgttgatcgtttcagtcggagcaagcgtcataaaaatatttgaatatgattttgcgtgcaccgcgttttccatcatcgccatgaaattaagaaccgcttttcgctgatggccttcgacgtgctcggccacaatcggcatgcctgtgttcccctgctctgtatcaagcagtgtcaggccggcgagcaccttcatgtacgtatcctgctcatttttacccaaatacttccaagtaagaagatcgccgtttaatgcgatctcttccggaagccaaaactgctttacgttttggttgtagaacatttgggtgaaatcatcttcatgctttgaccagtttgctgcgtcataaatttttgtcactgttaactctcctttaatcaaacgacacaagaaagacagctgtcctgcccggtatctttcgttcttgcatagtaaatggttttgatgcctctatggtgggcatacagatcaatacggttcagatcacgagttgtcatcgtatctttcaaaaacagggtaaagctgattccctgatcgatatgctgctggattgtcgcgatcatatccaccactttgaacatgtccatatcataagcttctttgtagaagaaccagttattagacgctaaccccggcatcgggtaatacgtttttgaatttccgtatgttctttcttcgatccgttccatgatcggcataacggacgccgtgctggattggacgtaggaaatggagcctgtcggcgcgatgcacagtctgtagctgtggtacatgccgttttcggcgacaaacgccttcagctctttccagtcttcgattgtcgggatgtgcatgccttcaaagagcgcagcgattttttcgtatgccggtgagaactctttttcgatgtatttattgaaatattctcccgttgcataagtggagccttcgtaatgctcaaacgtttcgcctttttctttcgcaagctcagctgaacgctggatggaataaaagttcaccatcataaagaacgtattcgcaaaatctcttgcttccgggctttcataagcgatgccgttttgggccaggtagccgtgaaggttcatggcgcctaaaccgatcgacttcatcgctttgttcgcgcgtctgactgccggcgcgttgcggatatccgtcgtctcagatacatgagtcagggaatccgtcgcgagtttcaccgtgcgctcaatcgatttatgtttcatgacattcaaaatatttaatgaaccaaggttgcaggaaatgtccaggccgatttcgtcttcctcgtcataatctgtgtaagccgaaacctgtgacgcctgaagcacttcagagcaaaggttcgagaatttcacttttgatacgtggttattcgcatgctctttgtttacgttgtcctggaacataatgtacggataacctgactcagaacggagaacggcaagcttttcaagcaatttgcgcgcattcactttttcttttttgacacgcgggttgtcaacaagctcctcatacatcgccgtcatgtccatctcatccatatgctggccgtattctttataaatcgtgtgcggatagaatacataagccgctttgtcctcacgtgcaagctcaacgaacttatccggaatgacgacaccgatagaaagcgttttgacgcgcacatcttcatccgcagaaatctttttcgtatcaagaaagtcattgatatcgcggtggaaaatgtttaagtacgccgcgccagagccttgtctttggcccatttggtcagcgtaacggaacgcgttatcaagaagcttcatgacgcctacaacaccttttgtggcgttttcaacatctttaatcgcttcacctttcgcgcggagcttggacaggttaagagaaacaccgccgcccagtttagaaagctgcatggaaatatcgatcgcccgtgaaatatcgtttaaggaatcattgacttcgagcaagaaacagctcaccagttctccgcggcgttttctgccggcattcaaaaatgtcggtgtgctcggctgatattcctgattgatcatcagattcacatattcttttgctttctcagtgtcgccatttgcgaagaacagcgcaacaattgagatccggtcctcataacgctcgaggatttttttcttgtcattcgttttcaaagcatagtcattatagaatttaaacgcactcatgaaggaaggaaaacgaaacttcttagcgtaagctgtcttaaacacttctttaatgtcttcaaaagaataaaggcttaagaattcctcttcgtagtattggttttcaatcaaataatccagcttctcttttaaatcgtgaaagaaaactgtgttttgattgatatagtctacaaaatagctatgtacagcctctttatctttatcaaactggaattttccatcttgttggatcatgatttcgttatttaactggatccattttggcacttgattttgtgacaactctttctacctcctgagtaaacaattcaacgtctttagatgtgccgctgagttcaaatttgtgcaagatcggcacctgatattgtctagagatggtatcggcgctttttgcaaagttatcgccccatactttgttgccgctcgcagcgactcctaataagagatgggcgtatttttcgagaaatgattgtgttgatgccggtacctgaccgaagtttgtcgtgtaggtgaccaaaacaaacggagtgtccacgtggtccatttcgtccaccttgcggatcagctgaaagtctgttttattcacaaaacgctgaacattccctgtctttgaatcaaatatgatttgaaccatccttatcacgacctatcaaaaataatgaatctcttaacactatatatagtatactaacctctcagaaaaacacaacatattgagatcgatttataaaaaattcatatttttgaaagagcggactttggctccggcccgattaacgcccaaaaaagagagcagaacgagaatcatctctcatcctactcaaggtgtcatgtgtaagccgatgtctatcataacatgaaaaaaaactgcttagtagtctagacttttattcttattttttgtaagaatcacattttttttcgctttcaacggtttcttcaatctctacatcagcaccgatttctttcagtacggctttcagagcgcttgtgatggaagcctccctgatcagttctttgccgtcaacgatgatgctggttccatattcatagcaggaatcatcttcacaagtttcttcccaatggttgattatcaccttgtgtttcaatcgtctcaccctctgcatgatcaatgtcagtacttagtgtagcttgtgcggcccgctttgtaaattcgaacgcttgtgaaatttattcaagctcatccagcgccgtttcttttttcagttcgattttattcgttttttcatcatagcggtatatttttagataaccgccctcgacaatgccgaaacgattatgttccagctgcaccatgccttctgtctgcgattcggcatccgccaagccgccgtcatcatccgtcaccaccgtctcgtgattgctgcaagctccaaacagcaaaaaaacagcgatccaaacgagcgtaatcctgattcttctcagttcattttcactttcgaacacgattttccgaacccccttttatctttccgatatacggcctgcaatatacagacgcgcatagaaaaagaccattgttcatggtctttgtcaaaaagtctattcaagctcaagctggacgtttttttgcggggcgaacgtggagatggcatgtttataaataagctgctgcttcccctccgtttcgagcaaaacggtaaagttgtcaaagccttttacctggccgcgaagctgaaagccgttgagtaaaaacaccgtgacgaacgtattgtcttttcggatttgattcaaaaactgatcttgaatattaatcggtttcatgtttcgtcctccttggttctcaatacaatactgtttcgattaaatttccagttttcctgctatgcactcgaaaatttccttttttttctgctcaatatcaacaggcggcgtcatatctgtccatgaaacgggcattttattgcgaaaccaggtcagctggcgtttcgcatatcgccttgaattttgttttaattgctccacggcctgaggaagcggcacttttccatcaagatattcatacagctctttatagccgatcgcctgaatcgattggctgtcccggatattcatatcatacagccgctttacttcgtcaagaaggccggtttccagcatcaggtcaacgcgctcgttaatccggccgtacagtacttctctgtccattgtaagaccgataagaaccgcattgtaaagcagctcccgtttttgggttttaagatgctctgacattgtttttcccgatacatgcaggatttcgagcgcgcggatgactcttcgcgtattgttttgatgaatggctgccgccgcttccgggtcggctgccgcaagcttggcatgaagcgcttccgccccttcttcagccgccagtttctccattcgctcccggaatacagggtcgccggagttttccgtgaacgtatagtcatacagcacggactgaatgtacagacccgtccccccgacaatcatcggcagctttcctctaccggcaatctcggtgatttttcccctcaccattttctgataatccgccgttgaaaaagtgtcggacggctccaaaatatcaatcaggtgatgcggcacgccttctgtctcttcttcggtgactttggccgttccgatgtccatccctttatatacctgcatggaatctccgctgatgatttccgcattcagcattttcgcgagtccgatgcttagttttgtttttccgactgccgtcggtccgacgagtatgacgacaggctgttttttatttttcaatatgtatcactctcttttataaatctccccctaattatagcattcatttcttcaggcacctatccattttgccctttttcctgagcgctaaacgtccgctaccacccgatcggctcgtttccgacaacctctctcgtttttcctttgagcgtatggcggtgcgttttccgtccttcctcccgcggatcgtaaacgacgccgccatgctggatccgaatcggctcattgtaggcggcaaaggtggtctctgaaagctcatggtaatgtgttccgtcaaccctcgggatggcagggccggaaatgccgtaatacctatgaaaatggccgttttcaaacgaggtgatgcccgtatagaaatgtgtatgctcatctgtattgctgccgttctccggctgcgaaaagccttcgatcatatggtagtgcccctgcactacatccgtaacagcccggtatgcgtgtgtgtgcggaggtttttttgaccaatcggactgatacaggcccacaaaagctcactcctttatttttttgataaatgcccaatcaaaaattggtgggctgaatactctgttatcatctcaaatttattcttggaggtacctaaattatgaatgaagaatacacatatgcagcagatagtgatatgagaccgtttggacggcccggatttgggtttggacggccgggcttcgggttcgggcggcccggattcggcttcggcttcgggcggccgggttttggatttggccggccttggtttggttatggattcggacggccgtttggtttttacggcggaccgttcttcggagggcttgtcggggggcttgtcggaagcgctttattcaatccgtacctgtacggaggttacggctacccttactatccgtattactactaagacaatcaaaaagggctcctttcaggggcctttttatataggcctaatgtcttgacttggcgggcaaagttcggatattattttattttactgccttaaacaaaaggcataaggattatgatgagagggggatttgatatgattctgggttatatcttcctcacaattgctattttatcagagtcaatcggcgcggccatgctgaaggtctcccgcggatttacgcggtttttgccgagcgcgcttgtagtggcaggctattcattggccttttatatgctttcacttacactgaatctcattccgctcagcttatcctatgcaacatggagcggagcgggaacggtgctcgcatccattatcggagcgaaatggtttcatgaaaaactggacaagcaggccgtcatcggacttgtattcttattggccggtgtcattctgatgaattggtagaaaggagaagcatgatatgaaaggattactctgcctggcattagccattgtatcagaagtgttcggaagcacgatgctgaagctgtcggacggttttacgcacttatggcccgctctcggcgtcattgccggaatcggagcctcttttatgtttttgagcttctctttgaaaagccttgatttatccgccgcatacgcgacatggtcaggtgtcggcacggctttaacggcaattgtcggcttttttgtttttaaggaagccatgacagctaaaatgatgatcgggcttatttttgtcatcacgggcgtcatcctgctgaaccgttccaagtctcaaaaagctaaaaaaaatcaaacggcccggagctgaccgtttgaactcgtcaagcgcgggcagcttttacttcaacctcaagctccatctccacgtttccttggaccgctcgtgaaatcatacatgaggactccgctttttgcgctaacttcctggcgagcgtaaagtccgtttcggctgcatccggctttaataatataaacgggcggtgaatgattttctggtacgtgaacacaccgttcgtgacgtctacaattccttcagattccatatgtagatcttctttatccaggccgcttctttccatcatcgccgcaagcgttataatataacaggtcgcggccgctccaagcagcatttcatcaggatttgtgccttctccgggtccgtccatttccttaggaatggacacagcggtttccagccggccgcttttaatatcgccgacgtcattgcgatttccgggccaatttgcttttaaataaaagtgatgttttgccaagggacaaacctccttttttttcagtttactcacctttcactggtttgtctttttttaagctcacgaatactcttgattgatcactctttttatcgtacggacaaaccggtaaaattcctccgtttttgtgaattccctttcgcggtaatcaaaattatcaaaaaacgcctcccgctgttctctgctgatctcaagctgtatactcagcccggtttgcgcctggttattgatattttcggtgtcaaccccggccagaccggtttttgaggttgccaattctgtaggaaatccgtttcgtttgagagctctcaccaattttttcgcccgcttccggtcgcttcctccgacaagagtatttttctcgtcgcctttataaccgtgaactgcgataacataatggtgctgcttaatgctttcgactgctgaaggctcatcgaacttggtgctcgtaatatgaagagtctggttatcatgcgcttttaatccctcaaacaggtaggttgaataatcatccctgaaagagcggacgatctcgctcaccccgccctcaattctccctccgtgcggggacatgatcaatacggggctcccctttctcttattgtacgatatatgataatcatcggggtcttcatgttcagccagatctttaaaatctgtgtatgtatcagaagaattcgagggatcagggtctgacgcataatgagcacatcttattagtaagaccattgctacgataatgatgacattaagtaaaattcttttcatcagctctccttctttgctcctttctgaaaaatgaaatattcattatatggatttttgtcaataggtcttatcttaacattctattaacattatcatcagtgaaaaacttcccggtttcgaaaaatcaatggattgtcacggttcaagcgctcaaatgccgggcatcagtgaaaaaaggttgagagagggcaaaaaaaaagggaggaacgcccgaattttcaggggcgggagattcacggccggaaacggacggcatcaagaatacgcttttagaaatgaatatccgcctcccgaagcaaatgcgcaggacagaatggagcccgtcaaaaaagttctcatctgcctttttgtacagcaaaatgccattacagcccgctcatcccctttttttatcataatggtccgttttgaaacggagccgtctctttattcatatatataatatcaatcggaagctgtttttccaaggaatgtctcaatatgatgttcatgtatatactaccttccgccggcttcattacaaaacgaacaaacgttccgtttcaactcgatttcttctcctgaaaaagccgcaagtaaccagcgctcctgaaggacaaacaaactgaccgaacttacggcctgttcatatggtatagagagaatcgccagaatgggaggaaaagtatatatgtttggttactcaatggtacaaatggtgcggtcaaatgctcataagctggactggccgctcagagaaaacgtattacagttatataaacctttcaaatggacaccttgctttttacacaattttttcgaaaaaaaggtgaaaaacagaaagaaaatgtcagtcatcattgaatttgaagagggctgccatgaatccggttttcacagcacaggacaggtcttatcaaaagaaaaacgctgcaccataaaaaagcagtttcaaacaatcaattgctgcagcgccgaagtcacgccgtccgcccttcacatgcttctttcgcaatgccgggatatccgtaaaatctatttaaaccgtgaagtaaaagctctccttgatacagcagctgaatcgtctcatgcaaaagaagtgacccgtaacggcaccgtattaacaggaaaaggcgtaaccgtcgccgttattgataccggaatctatcagcatcctgatttagaaggcaggattatcggctttgcggactttgtcaaccaaaagacagaaccgtatgatgacaacggacacggcacccattgcgccggtgatatcgcaagcagcggcgcttcatcttcgggtaaatatcaggggccggcgccggaagccgatctgatcggagtcaaggttttaaacaaatcaggatcaggaaccttggctgatatcattgaaggtgtggaatggtgcatacaatataataaagaacacacaaagaatccgatcagaatcatcagcatgtcgctgggcggagatgcgctcaaatatgataaagaaacggacgacccgctcgtcaaggccgttgaagaggcatggaatgaaggaatcgtcgtctgcgtcgccgcgggcaactccggtccggaagctcaaacgatttcaagccccggtgtcagcgagaaggtcatcacggtaggcgcctatgatgacaatgatacagccagcaatgaggacgatacggtcgcttctttctcaagccgcggcccgacggtgtacggaaaagagaagcctgacattcttgcgcccggggtcgatatcgtatctcttcgttctccgcgttcatatcttgacaaattacagaaatcaaaccgagtaggctccttgtatttcagtctgtcgggcacgtccatggccactccgatctgtgcgggcatcgctgccttaatccttcagcaaaacccgcagctttcgcctgacgaagtgaaaacattgatcagacaaagtccggatcaatggacaaatgaagatccgaacatttacggagcgggcgcagtgaacgccgaaaacgccgtgccgaaagagtaacctttttatcatgagaacggggtcgtctgcaccggcagatgactccgtttttcaggtgaatagatgaaacatttataatgaaggaactcggaacaggtcagaaccggctgtcagaaaaaaagatcaacgcaaggcagtgtatttctaaaaaaatagggaataagtatggtgtagataaaaggaggaatcacaatggcacttacaaacaccgaattgtctgaatggctgcaaaaacagatcggacaaacgcttgatatcagaaaaggagagctgacagacagccgaaacgagatttctgatatggatcagatcatgcttcaccttgatgacgttctcgtccgccggacaaaccatcccgatgactatgtagcggatgaagaactcgtcttaaaagggcacggcacaacctatacggaggaaggaaatgtcccgcttccccaagatgcgtatgaaattcctctgctcggcgacattaccatccaacaggagcaagacggattaaaggtacatacagatcgggccgtgtatacaatcgggacccggaaagagcaataaaaagaaaaaacgccgtgaaacagcggcgttttttattggtttttttcttcagaatatccgtggaacatcgtgaatgcgcaaagcataatgcctaaaataatgataatcgggagccagatcacggcaaacttataatccggttcggcaaaagcgcctatgaccgccccaaagcaatacagaaccaaggcaagcgcgcgcaatacagcatctctcgtaaactgcttccgcttgtccgctttgtaaaaccttgcggtgagatcttcaaaaaaattagcgagcgttcccgttaatacggtcgtggaaatccccgctacaccaagttttctcgcggctgtcgtctgcattcccattgcgaagctgagcagcataatcagcacataaacagaaatggcgtctgcaaaaaagcaggagaacaaagcaaacagcagcaaaacagctccttcaatagctaaagcggcagttaccgcaggggccagaatgatttctttttattgcccacaagcagggccgcggcaataacgccggcaataaatccgattaacgaggttaacgatttgagtacggcaaggtgccatgagttgccgatcgccaggccgaacagaacgatgttccccgtcatattggcggtaaagatatgtcccaggcttaaataaccgatcacatccacaattcccgctgttaaacaaagaagtaaaagtgcaatatttcggtatgtagtcactgtcaatgtgatccaatcctttctcatgctgattccaacatataagtttactctttgccatttcatatgtccagccggcgtgccgctttttcaaagcataaaaaaactccggcgaaccggagaagttactgaacgataaataatactctcgtgccgtcggaatagccgctcatttgatttccaacccatgaaccggccccgcggttatccgatggggttacatatctgatatcagcccccgccccgccttctgtgcagactgccatgggccattcatcacggtcaaacccgggctttgtcggaattcctttcaatgattctttccttctgttctccgctccgccccgatcaattgtacaaatctcagaatgacctgccgaaatggcgtcttttatatgatttcccgtctccggatattttgacagcgggaaatacagcacctgatcgtatcgggatgcagcatgagcagcactgtccgaatggatgccggcgcccgtaaggccgaactgaagagagatcaccaaaagcagacttgccgcccatttcataaacgcattcattcacatcctccttaagaagttgatatgaagcgtaaatatgtatattagccggatttaacacacatgatgaaatggcaaaaaaagtttgctgttttgttgataatcaacgaaaatggcggctttacgatttgtctattgaaccggcttctttttccttatatattttagacatacttatgagccgttgtgatcagtgtcttcggcagataaaaggaggaatgccgtccggtcggcaggcaccggctgttggttatgtcttttcaaaaacatgaaggcggggaaatccagatggaaaaaacaatgtttcacccacactcacccgagtttcacgaagacccttttgcggttttaagcagattcagagagcaggaccccatacataaattcgaactgcagcgtttcggaggcacctttccggcatggctcatcacgcgttatgatgattgtatggcgtttttaaaagacggcagaattacgagagatgtaaaacgggttatgccgaaggagctgatcgcgaagctgaatgtcagcgaagatatcgattttgtctcagagcatatgctggcaaaagaccctccggatcattcacgtcttcgatctttggtgcatcagggttcactccccggatgattgagcagcttcgcaccgggatagagcagatcacagaagagctgctggatgaaatggaaacaaaagcagaccctgatatcatgaaagatttcgcggcaccgcttccgtttatcgtcatttccgagctgctcggaattccgaaagaggaccgcgccaaatttcaagtatggacaaacgcgatggtcgacacgtcagagagcggacaagatgcgaccaaccaggctctcaaagaatttaaacaatatatgaaaacactgatcgaagaaaaaagaaaacatcccgctgaagatctgacaagcaagcttatttacgctgaagaggacggccaaaagctgagtgaatcagagctgtattccatgctgtttttgttagtcgttgccgggcttgaaacaacggttaaccttctcggctccggcaccctggcgcttcttctgcacaaagaccagatggagaagataaagcgacagcccgaaaatatccagacggcggtcgaagagcttttgcgttacacctctcccgtcatcatgatggcgaatcgatgggcgattgaagatttcacctataaagatgtttctattaaaaaaggcgatatgatatttatcggcatcggttcagccaatcgggacccggaatatttcgatgatcctgatacattaaatatagcgagaacaccgaaccgtcatatctcttttggattcggcattcatttttgtctcggggctccgctcgcccggatggaagcatccattgcctttacttcgcttttaaaacggtttccgaatatagagctgaaaggcgcgcacgaggatgtaaagtggagaaaaaacgtgtttttgagagggcttgaaacattgcctgtcagattttaatatcgccccctgtttatcgggggttttttaatgtcttataaacaggaaatcaatataacagtgaatatttagtacatagtgtatttagttctattgtaaaaaaagcggccggattgctccggccgttctctattaccgttttaccaactcatttgtttcgtccagcttttttttgaaagatttaaggaaatttgcgcttatcgttcctttgtttgcgtacagtttttcgcagaatgccttaatggcgttttgcggctttggttccgacagcattgtgacatgattggaagagtggacgtccagcaggtgaaagtgtttcatctggtgttcccattctttccaatacgcatcatggtctaacggaatttgttcttcctctgctgtcagataacgttcaaaatctccgagaaacaaaccgcttttattacggaagtagtagcattgcagcgcttccggatgaggcagcggcttcatgtcatactcttccattccgtaagcgagctgcgtcttcatcatttgctccagctgcatccggatcgcttcttcggattttggcagaccgcgctttttggcaaggccgatcaattctttcaatacttcttcttcctcagcctggacggtaatgtcttctctgctgattaatgcctcttcaaggttttcaggcttaagatatgccgtaagcatcgtattgatcgtttgcagcatgactgacttaacagatggttttctctctttccatttttcactgtacggggtgtcgatcatgacggcgctttttactgtatgaccttcctcctgcaagaggcgcgcggtttcataagcaagcatcccgcccaaggaatatccgccgaggtcataagggcctttcggctgtaccgcttggatgattctcatataagaagcggccgtctcttcgattccttgcagcggctctttccctgtcaaacctcttgcctggatgccgtaaaaaggacgctgactctttttggcgaatggctggtatgcttcaacgcctcctgttccgccgtgaaaccaaaaaacaggacggcctttttctctttcattcagcttgacgagttcgggaaaattccggcccgcttcatgcggctggttcgtttttaacagcatgccgatctcctgaagagtgctgcatttctgaagagcttccagactgatgcggctgtctccgtcctcaagttttttcagcagctgaatagaggagattgaatcaaagccgtattcagtcagcggcttattttgatcaatttccgctgccttcatccccaaaatgtcagccacaatgtcagctgcgctctcgcggcggagctgagggtcctgggaaaccggcgcaagggtgatgtcttctggctgaccgccattccaatacttgtggtgttcaaaaggatatgtcggaagcggcactctttgaacagatttgccttggtggagtctgtcccacggtatatccgctcctttcacccagcaaaatgcaagcttttccagattgttttcagccaacagcgtctccgtgacgactgtaccgagagtcccttccagtaaaacgccgatatctcctgatccagtctgctgactgcctgtaaagaagcttttcattccattgctttcttcggaaaatgctctgtactctttcagtttttccagcaattcatcttgattgcgggcaacgagtgccaagcggcagttcatcgcctcacggccggtctgaagcgtataagcaatatcccgcagtgacggagtatctccagtttgcacaaaatcagccagctgacctgcggccgccttaagacgcccttcgctcttagcagaaagcacgataagctgcgggtcatgcgcagattctttgtctttatggctcggactgtactgttccaagacgacatgcgcattcatgccgccgaagccatagctgttaattgcggcccggcgcgggatcggtctgcccgtatggtcggtgagctgtgaccattcctgattgtcttcggtgaaacggaagcggcttttctgaataaccatttgctcatttgcagctgtaaatccgggaatgcccgggatggtatgatgcttcatggccatcgctacttttataagggcggccagtccggaagcgagttcgccgtgcccgatgcaaggtttcacggtgctgatataacaaggcgcgctttcctcttgatttgcagactcgccgtaacccgctttgattgcattaaactccagcgcatctgccatttcggaggcaatgccgtgcgcttcaatataagtgacggtttgcggatcaacatcggtgtcttcgtacgcttttttcatcgcggccttcattcccgccggattcggtgcgtgaagcgacatgcctttaccgccgtgagacactcctgttcctttaatgaccatgtgaatatgatcgccgtcttcaattgccgcctcaagcggtttgatgatgataacgcccgccccttcgcttctgacaaagccatcggcatctttttggaacgatttcgcccggccgtttttgcttaaatatcccatcgagtcaaaaccgataaaacctttcggcgattgcagaatattggcggcgcccacgacagcctgctcacattcgttatgatggattgattgaaccgccctgtgcaatgccaccagcgttgacgtgcaggcagcctcgtaatattcactcggtccttgtaaattcaaggcatatgatatcctgttcggaatgatggacggaatggctgttccattgttcggatcgctgttgcccgcggcaacgaaaacgcctgtcggtctgcttgataatgccttatttgtcaggcccgcatcctccattgccttccatgtatgcatcaaaagcagaaactgctccggccccatttgtgatgcctctttaggagaaattccgaaaaagagcgggtcaaattcgccgacaccgtcaataaaaccgccccatctgagactcgtgtcattctcatcgccggcgtaacggcgccagtcccagcggtccgccggaatttcggtaatacagtgatccccgtttacgatgtgtccccaaaaagactggatatccggggattgcggaaactgagctgacataccgataatcgcgattccttgcttgacatcggcgttttcacaaggcgtatgctgtttcttcggtaaagtgcgctcttctgtttccgtgaccccggcctcttctgaatgcctatgatcggcaagcaattgagaaaacttgctctcatatgctgacgcgaagtggcgggtcagctcctccgccgtcggatactcgaaaaacaatgttggattcacatcgatgtccgcctcttggccgatctcttttgtcagcccgatcagactcgctgaatcaagtcccaattccatgatattcgcgtcagaacgaagagatgacgcgggttcatccatcatcttggcgagcttgccaaggacgtagctgcggatatcatctgtcagactgccggcagaaatcggtgctcccgcattcttaacagccgttcgggccggctgattcatctgttcggttttcgggcggaaccgtttcagggcatagccttcaaaacgcatcaccacttccgatcggctgctgatgacatctgcgttaatcagaatcatttcccccgtttgtttagccagcttgatgtgcagccagcaatcggtaagattttccgggctgctgaaggtgacggaattaatgccgaacggcagatagctttccgtctctgtttggtccaataaagaaagcgaggccaagtaagcactgttggcgattaatggatttatggcataatgatgcgcttgttgtgagtcgctattgttcaggttcactttcgctaaaacggcatcagtgcctttgtacagacgggtgatcgttttaaattcttctccccacacgacggttcccgttccatctccgtataactcatctatccggcccacttcccggtaagagcgctgaatggccgccagatctgcgtgctgcttttgaaacggatacgggctgcactcggcatacgccgctatgctccaatcaggagacgtgcggctgcggtgcattatgctcagttcaaatccatccccgttttgtttcgattctgttttcagctcgatgtgatcgcctttttttacggtaatggggctgacgtaattcagttttttaatatgtcctccttccgcttcaggaaaaaggtcacaaaaatgatcgactgccagactgttatatgtagcgccgacgagtaccggttctccgccgaattgatgccctttcacgtatgggtcgtcatcactgtataccgcctgaacgccggcagcgttttctgattcaccgaaatgaaaagaagtcccgtggtcaaaagcgtaggccggcagatgaacggcgtgctcttgctgcaactgatcaaacgtgatattctctcctttttcccattgccgcgcacgccggccgatatcagaatcggagaaattgagattccgctgatccatgcggtaagcggccagtttttccagcagttcctgaacggaagcagccgtaaatgccgcccgatactccggatgatgcgttcttttttgcagcgcagatgcgatggcggccggatgaagagatggcgtcttttctaaaaaggccgccagtctctcaagataggcttcaaaactccattttgttttcgctgacacagggaaaatatattcctcatcgccgtgacgggcctgatcggaattcgggctgatatattcttctacgatgagatttgcatatgccccgcctgccccgaaggaattgatcatgcttctccgcggtacgatgtctcccgtctcggcatccttcagacgctcccaatactcggttttctcctgcaggtaaaaggccgtttgttcaagcgcgatattcggattttgcggttttgcgttaatggtcggaactaatgtttcccgctccatttgcagcagcactttcgcgagctgggacatcccggaggccgcctctaaatggccgagatttgacttgacggatccaagcgcgcaaaatcgttttttatcggtatattgcgagaacgcgttcgtcagggcaatgacctcaatcggatctcccaatacagagccgtttgccgctgattcaacataactgattgtttccggattgattccggctttgtcaatggaagccgccatgagcttcgcctgctgtttcggatccggagccgtgtacatctgccttccgccgctatggcacaacgcgctgcttttaatgaccccgtaaatatggtctttgtcggcaaccgctttggagagcggcttcaagagcaccgcaccgactccttctcccggcatcagccccgtgccggttccgaagcttttgctttcacttccctgttcaagcaaattcgcccgttcgagcgcatcatatttagacggttcaagcgtgagattgacccccccggcaatcgccatggaacagctgttaagcttcaggctttcacaggcgagatgaatggcgctcagtgagctggagcatgcggtcgtaacgcccatgctcgggcccgttaaattgaaaaagtgggaaatgcggttggcgatatgccaatcccctccgttagagctgagcgcagctttttccaatgacgggatattccagaaatattgattgtacatactgcccataaatacaccgattccgctgtctgattcctgccattcgtttactctctctaacgagtagccgccgttttcaaatgtttcccatacggtttcaaggcttagacggagctcaggtgtcatctccatcacatggtcttcccggatgtcaaacaagtgatggtcaaaagcgtcaatatgctgcagaaatccgccgtaccgtgttttgcgttcttcttttcgtgtttcttttgccatcgttttcagaagaccggacttccatctgttttccggagcttccgtaatacagctgtctccggcttttaaatgctcccacagctcatcgagggtttcagactcgggatagcggccgctgatgccgataatggcaatgtcgtcacgatctgagcgattatcggtgacggtttctgtttccggctttggcgcttttggctctttttgttcagtgataaatcgccgcgtttccgtgacaagcggcaccggttcattcattgcaggttccggatgctccgtttcaggaggcgcttgatcggctccgaatgcctgttgcagcttatccgggtaagtttccagcaaatactcggcaagttctttcgtattcgtgtgttcaaataagaccgttttcggcagctcgcccgtcaatgtttccagttcacggataaaattcacctgcaaaatggagtcgatgccgtatttttcaaagctggtttccggctgaatgcgctcgggagcaagctttatggacttggctaacgtttcttttatgaattgcaccgtccggtctgtgactgagaaagacggttctgtgaaatcagccggctctttggaagccgcaatttcttcaaccgccggcgcgtccggctgcttttgcctgatgacgccgtcgctttctgctgccacgatctgctggccgaggtgatgtgacgattccgccataaatgtaacgtaccgatatccctcgctttccagcgcagactgccacgcttcaggatacagcccagggcatccgggaatacgcagtttggcgtcttcatacagccaccagccttccaaaagaccgaatgtcagatgagaataaaccgaatggctgctgatctcatttaatagcaaaatcccattctttttaagcaccgctttggcattgcgaagtgtccgccgaatattttttgtcgcgtgaagcacatttgccgcaattaccgcgtcatatgcacccgcctctataccctgcaaagccgggggctcttccacattaaaccgcttataagtcaaatacggattgtcgggaccgtattctttttcagcatgcatgaaaaaggcctttgacagatcggtgtagcaatattctttcacatgatgtttgacctcttttaatcttttgaaaacggccgcgctcgtcccgcccgtccccgctccgatctctaatatccggatttccgcgttcgggtcttctttcaggcgttcttcaatgaaagccgtcaatgtgtcagcgagcacctcattaaagtagtctgccgtttcattgtttttatagattccttcaaccaattccattgaggaatcaggaaacagaacatcagtggcagaaactctgccggataaaatatccggcaaagctctgagagcggtctccactaaggtgatcatcgcccgtttgctgctgtccttgagtaaaggagctttcttttcatcccattcttgccacagaacgtccgcacgctctatcggacccgttaacacatacgtactgccagactgtttcaaaaagcctttttgcaccaagatggagatgctttcttccagccacctgccgtaaaacccctgcataacaggctgcgtttcgttttccgtaaaaaatccgacagatttcagctggcctgccaatagtttgtaaagaagatcttcagtgttttgcaaagccgtcccctccttaactcaattgttgtacatgtcttgttactttaggctgatagcttcgcagtttttgcatcgccgagccgtgatgttcagggtatacttctatcatttcttccggtttttcctccggctcttccgcctgtttcatcatgacgaactgattcaatgggccgccgagcaatcgttcaagcgccgccattgcttccggcgcttcaattgatccgactcccgcctgtttcatccgttcttgatattcggcagatgatacgattccgacactgccccagtagctccaattcatcactgccgccgaatacggccgaacttgagccaaatgagcggcaaaggcatctttgaaactgcacccggcagcataattgctttgtccggccgctcgcgcaaatgattgaacggatgagaagaacaaagcaaagtccagcggctcattttggaacacgagggccatattcacgctgacattgacttttgcagcgagcacgcttctcaaacggctttccggcatattcgccaggctctgatcctctaaaacaattgcggaatggatgattccgttaatttgcgggtgcgtgcgtttgatcgtttcatacgcccgtgtgagctcatccgggtttgccgcgtcagcttcaatataaatcggcgccggcccgaattggctgagtctgtcgattttttcctggatggcgctgttatgttttcgtctgccgatccaaacgactcgcgcctgatacgttttcacggcatattcgctccatgcttcgccgatgccccccgcgccgccaatgacgacataaacgccgcctttttggtaagcgggccggcttgacaccggctgctgtacagggatgaggcgctgtttgtaccagtgattgttgcggtacgcccatgtattgccttgctcatcaaacggcgctgagaacagctccgcctttgaaacatcttccggacatccggcatcaatcagccgtgtttgccagttcggatactcttttgcgagcgaaccgatcaaaccgtgaatgcctgcatgagccggatcaatgatgtccgccggctgtacggactgtgtttttattgtgactgcagtcaagctgattcgcttgcttccgtatcctaaagcaagcatcgctttaatcactctgtacatctggatgacgcccgcatcttgagctttcaccatgtcaccatcgctgtgaaaaggagcgatccatacgatatgcccgaaagaccctcttgctttcagttcagccgcaacagcctctatttcatcctccgggttgatatgaagccgtttcgcagaaggatgatgcaattgaaaagcctcgctttcctcatcccctgcgataaagacaacctcttccgtcttatatgccgggctttggtcacggaattccgcaagatcccataccggagccagaaggtttgctccatttaatgatgtttccggcgccggtccttccatcattctggaagaaatccctttaatcctgacacagacgcggcctgtctcatcgcataagtcaatgtccagccgctgtattttttcatccgttccccgggagctgacatacgcccacatgctggtcgtgcacgggctgaaaatgtccagttcctcaagggcgaacggcagtgacagctggttatcatctgcatgcagcttcagtccgattgtcgcttgcagagctgaatcaagcatacacgggtgaagaacgtattgatctgctgtttcttcgaggaaggaaggcagacggagctcagctaatgcttgattgcttccgatatgaatgtgctgaattccttgttgtccgggaccgtagtcaatgccgattttgttgaataagccgtaacactgttcagaagtcagcatgctgaggccgcattgagctttcagtgcgcctatatcacggtgcggagcctccccggcgccgagaatgccggcagccccctgacagtgtatctgcctgccgcttgcttctgtttgtgaatccgtgtaaatgtcatacacgatttcaccgtttcccctcgggttcaggctgatttgcgcttcaatcgggcggttttccgcttcgatcggccgaacccaaacgatgtttttcagacggatgacagacggaacttccttttgccctttgactgcctgagcaaccgccgccctggccatttccaagtaggcgacgcccggcatgaccggcttgcctttaataagatgatcggtgaaaatcgtctcttgtcccgtaaattcggatcggtaccgctgctctgttaaatccgatacattctcgtgtagcagcgggtgcagcacccgcgccgtcggcacagcttgcggtttttctgctttcggccggttgtccgtgatccagtaccgctctttcgcaaacgggtaagcaggaagactcatccgttggggcttgatatcagaatataagccgtcccatttgatatccgcgccctgcacccataattccgcaagcttgtcattctcccggcggcttatcagctcttcgatatccgcttcgccgtttgcgcctgccataatggatttcagcgggattttacccgcttttcctttataaatgcccgctttgtcataacgtcctttcgcacagctctttagcttgtcccgcagttcttcggccgaggaagcgataatggccgctctttcttccatcgcatcacgcccctgctgaagcgtgtaagcaacatcggcaagatccgcatccgtaaaagaagcttgcgccagctgctgcgcctgttcctgcagacgttcttcttctttggccgacagcacaaagatttgagggtgtgtgaaaacagctgtttttctttcttccttcgggatatattcttcaatgacgacatgggcgtttacgccgccgatgccgaaagaactgattcccgcacggcgcggcagatgattgccgttttcgtctttcaatgctgtccattctcttttttcctgtacgatgtaaaacggactgtctttcagtttgatatacgggttgatgacctcgctgtggaggctttttgcaagtgttttatgcttcatctgcatcagcactttgatcacacccgcgacaccggctgccagtgacaggtggccgatattggtttttgccgatcccaaaccgcagtgactcgcgtaaacggcgggatcgcctgttttttcgtacagcttttgaaaggcggatttcaggccgttgatttcgaccggatcgccaagctccgttccggttccgtgcgcttctatataagtgacggttctcggatcaatgcccgctttgtcataagccgttctgacgacttccgcctgggctttcggattcggtgtcgtcaaggagttcgcacgtccgccgtggttgaccgcgctgcctttaatgacgccgtaaatatgatcgcctgatttttccgcttctgacagctttttcaaaaacagaattccggcaccttcactgacggcaaatccgtccgccctgtcggagaacgttttgcatttcccttctttgctcagcgcacccgctttatcataagcgatgtggccttgcggtgtgacgacggtattcacgccgccggcgatcgccatctcgcagttcccgttttcaatggcgcatacggcgtgatgaatcgcgaccagcgagctggaacaagccgtgtcgatcggttcactcggcccgtgcagattgagcatatagctgacgcggttcggccctgctgacggactcatatttgcggctgacgcaccgccgatatccaggtcggaaaacagtgagccgtacccggtatttcccgtgccgatatacaggcctgttttcgtgccggaaaggcttttagtggaatatcccgcatcttctatcgccttccacgcatacatcattaacaagcgctgctggggatccatctgttcggcttccagcggtgaaattccgaagaacagcggatcaaattccgcaactccgtcaataaatccgccccactttacatttgttttgttggcttcgttaagcgggtcaccgtaatactcctgccagtcccagcgatccgccggcacctctgttatacaatcttttccctcttctaaattgcgccaatactcatcaatatttgcggccttcggaaacactccgctcatgccgacaatggcgatcggttccggtttatgttcagccgcagtctgaacatgctgtacggctgtttttgcaaatcgtttgttccctgccagtctgatgccgccatcatctgttacaccgcttttcttttcttctttcggctgtgtgctgccggcaaattgcgtttgatagtcttctgctaaatgatgcgccaaggcttgaatcgtcgcatattcaaaaaatacggtcggtgtcagatcaagctgataagtgtcattcagcttgttggcgaattccgtcagcgtaatggaatcaaatccgtattgattgaactccaattcgatatcgatttcttcaatgtttattttcagaagcccggaaacttcttttgccagcaattcctgaagtttggccgtcaggtctttcggcgcaggtgtttcttccgttttcttaatcggtgcaaaagcggatgcgggagtcttttgaagcagtttttcccgcattacggcgcggtttccttctataacgagcacgcttgttttccccgtgctccatgctttgtaaagagcttctattccggtttcagtgcgcatcggcgttacaccggttcttttttcggtgagcttcgccatttcttcattgacttgcattccgccgtctttccaaagcggccaattgattgacaatgtgtgaccgtggcggtacattgccgtaaccagcgcgttgcggtatgccgcatagctgtccataaatgcgtttgccgccgcataatccgcctgtcccgcattcccggtgacaccggaaatggatgagaaaacgatgaaaaagtccagcgctaaatgctcggttgcttcatcaaggttgacaaatccgtccgttttaggagccaatacactgtaaaactcttcggttgttttctttacgatatattgatctttcatcacacccgcgctatgaatgatgccgtgaaggccgccatattccgtttcaattgttttgaccaggtctgccgcagttagagcgtttgttacgtcagcctgtttgtattccgcttttgctccgagtgattcaagcgatttcagctgcatccgctgattctcgcttaatgcggaacggcctgtcaaaaccagcgtcggctctttgactttccgggcgatttctttcgcgaaaataaagccgaggccccggctcctccggtaatgagataaatccctccgtcgttccacggaatgcgtattttgccgccggacacggccgtttctttgacatctgcgctgtatcggatgccgtttttatatttgatatggctgtcatcagcccttgttttattttctctgatgatgtctgtgattctgccgttttccgctggttctatttcaatcagctgggttttcagttttttatgttccaggccggctgtttttagcagagctgaaatccctgagagcagctgatgcttatctgttttagagagaaccgtctggataaggacgtctccttccgtctcttccttcagcagtttttgcagcgtctccaatatccgtcctgtataatcacggaagcgcgccgccgctttcccgtgcagggaggtcatttcaatacattcagctcccgcggcttcaaccgcttgttttagtccggcgtctgtgtcacaaagcattacgatatgccgggcaaaaaccggttccgtttgagcagcagtttcatcgcttcgtgtccataccggctcaagcatgagcgtttccggagctttttcttttttctcaggttctttttcagccgttctgaatgacaaacctttcagccttacgcaaaccttgccattttcatcacaaatatcaagatcgcgtttttcaacatgtccggctttgtggtcttcagaaagtctggcgtaaacccacatctcggcagcgcatgcgctgaatacttcaagctcctgaaccgcaaacggaagcatcagttgttcatcatttgttccggttaatatgcttgatgcctgcaatgcagagtccattaagcccggatgcatgacatactcctgtaccgtgtccgcacaagccgcatcaagagacagtctgcccaatacgaaatcatcacctgtataaatcgctttgacaccccggaaagccgggccgtaatcaaaaccgattttgcggtacatatcgtacacttcatctgcagaaaacggtgtctcggcggattgtgatctcagtttttggagatcaatgaccggagcctttgcgtcagggcggactgatactgccccttggctgtaaacggacggctgatctgtttcccggccgcagtaaatgtcgaattgaacgtcatttgccgtttcgggaatgagacggatgttgacatgaaccggctcgtcttcaatggtaatcggccgcacccaaaccgtattcttaagctggacgcttccttgtccggccggaacttcagatgcctgttccattgctgcgcgcgccatttcaagatgtgccacacccggtaaaatcggcacgccttttacaacatgatccgcaaggtaaaattcttctcctgtatagattgagctgaaccgctgttctgcaaggtttgaagtatttctgtgcagaagcggatgaagcgcgtcttgttttccggcagatacagtgcttgttttttcgtgttttccggtgtgtttcgccgcccaatagcggtcttttgcaaaaggatacgacggcaggctcatgcgtttaggcggccggtctccatacagcttcgcccaatcgacgttcagccctttgacccataattcaagcagcttcgcgtatttgccgcgtgccatccatttttcaacggcttcttgaatttcttcatcttccgtcagcatttgcagcgtgcctttgtctattcttcctctgtacaaatccgcatgcttatctccagtgataaactgtgacagtttttcctgcagttcttctgcggatccggcaataaccgccaggcgttcttccatggcgtcccttccgatttggagagtatatgccatagaaacgaggctggaatgatcgtaccgtttttcagtaagcgcacgtttcagctgttttgcctgctctttcaggcgtttttcatttttggcggacagaacgaaaagacatgggtcgatatgagaatcatctgcttcctctctgtcttctggaatgtattcttcgatgacgacgtgggcatttacgcctccgatgccgaatgagctgatgcccgcgcggcgcggctgttcgtttccgcgttcgtccgtctgcgtcttccattccatcgtctcccgcaccagataaaacgggctgtcttcaagctgaatatacggatttaccgtctcacagtggagacttttgactaatgtgcgatgcttcatctgcagcaaaattttaataatgcccgctgctcccgcggcaagggataaatggccgatattcgttttgaccgaccctaagccgcaatagccggccgctttctcttttccgtctgcaaacgagctgaacgcttgtttcaggccgttaatttcaacgggatcccccaattctgttccggtgccgtgcgcttcgatataagagactgttttcggatcaatgcccgcttttttatatgcggctttaataacttccgcctgttgtttcgggttaggcgttgttaaagatgccgcacggccgccgtgattcaccgcgcttcctttaatgacgccgtaaatatggtccccatccgcctcagcggctttcagctttttgaggaaaaagagcccggctccttcaccatgggcaaaaccgtcagcctgatcggagaacgtcttgcatcttccttctttactcagcgcgcccgctttgtcaaagctgatatacacatccggaagaacaatcgtattgattcctcccgccaaagccatgtcgcacgtcccttcttcaattgaagaaacggcatggtgtatggcaacgagtgagcttgagcaggcggtatcaatcggctcgctcggcccgtgcagattgagcgtatagctgacacggttcggtccgacagacggacttgtattcgccgcggatgacccttcaatcgccgcatcggcattggctaaaagagaaccgtagccggtgtttccggtcccgataaacacacctgtctttgtgcctgagagactctttgacgcatatccggcatcttcaatcgctttccacgcatacgtcagcaagaggcgctgctgagggtccatttgctccgcttcccgcggtgaaatcccgaaaaacaacggatcaaattcagcaattccgtcaataaacccgccttggttgacgtttgttttattggcttcttttgcgggatccccgtaatagtcccgccagtcccagcggtctttcggaatctcggtcatgcagtctttgccttctttcaggttctgccagaaagcttcaatgtcttctgccatcgggaaaatcccgctgatgcctacgattgcgatcggttccggcccttggtcccgctgcactgtctgcggaagtgtctcaggcagagtgcggcgtcgcttaacggccgggcgcgtaatttgagtctcttttaccggtcttgccgattgaatcgtttttgtatttaccgcaaaccgtccggcaaattcctcttcgtattcactgattaaatgaacggcaaattcatggattgtcggatgatcaaagaaaatcgtcggcgttaacgtaagccggtacgttttgtttaactggttcgtaaactcagtcatcgagatagaatccagcccgtattttgtcatttcttcatgaggatcaattttgtcaatgtttacttttaacagcgaggccgtctgctgttttaacagatgcttcactttttcaagcaggctgtcagcatcaatgtcatgacgtacgccgatctctgcttccggatgatcattctctttgcggaaccgttttgctttcatgtgtttcacatctccttcaaaaaccgtcatccgggctgtcccgctcatcaagccttgatataaagccttgatgccggcatctgtgctgagcggtgcgattcccgcctgctgcatcagcatatcttccgtctgctttcctgcctgcattccgccttctttccataacggccagctgacagaaagcgtctttccgtatctttgtcctgcggcttgtaaagaacggcggtactcggcatacatctccataaaaacatttgcagacgcataatcagcctggccgacgcttccaagcacacctgataaggatgagaagacaataaagacatctaatttctcatgttgtgacgcttcatcaagatacacaaggcccttcactttcggagcgagaacgtgttggaattcctctgccgtcttcttcaccatgtagttgtcttttataatgccggcactgtgaacaatcccgtccagcttgccgtgccgtttacggatattgcggatcaatcggtatacttctgcttcgtccgtgacatcggtctgctcgtagaaaacagaagcgccggcagcacgtactgtttccagcatgtctttctgcttttctccgagagcggaccggccggttagtatgatgacggcgtcttttgtacggtttgcgatctcttttgcaaaaatcagacctaaacctccggcacctcctgtaatgagataaacgccttcgtctttccacggaatgtccggctccgcttgagaaatatccatctcttcccaatcagcggcaatgcgcttgccgttttcatatttcacatggacgctttcggcatgcatacggttttccgccgctttttccgcgatgccttcagcactttctttctcctcgacttcgatcatttgacagatcagcttggaatgttcaagacatgcggttttgaagaggccggtaatgcctgagaacacctgctgtaagcctgctgaccgcgtaacagcctgaaaaagaacgcggcccttcggcttgcttttcattatggttttgatatggccaaacagctgacccgcataagaatgataccgctctgcaatagatgcgggacgatcgtccaggataatgacgcgtgcatgttcaagctttgcttcgacagcttgtttaacggcttcatcgtactcacaaaggaaaatgatatgctcttcatacgaaggcgcatgatcggccggtgccgtctgctctttccagaccggttcagcgaacaatgtgtccgtacggctgaccgaaacgccggcacccgcgttttcttccatgatccgcgttgagaaacctctcatccgcacacaaagccagccgttattgtcatataaatcaatatctgctttttggataggatcgccggctttattgttcgcactgaatgtgacgtgcacccacatatcatcagcgcacggattcagaacgtccagctcctctaaagcaaacggcaatgcggctttgaatggttccccgctttctgccagcagcgctctcgtcacgttttgcaaatattcggcggcctgaagcgcaccgtccatcatactcggatgaaggatataatcagctttcgtatgggagagggattcaggaagcttcaatttagcaagcagccggtcttcgcctttgtatacaagctggacacctttatagccaggcccgtaatcagctccgatcattcctttgtaaaacgcttgagattcgattgttccctgcgtgcaccggcgcttcagctgctcaatatccgccgcttcctccggttccttccggatgatttcagcgatgccctgattataaagaggagcttcttcaccgatagaatcgttaccgccgtacattctgtattgaatctgtccgtccccttcttcataaagtccgatatggacacggacagcgtcctgatcgactatcaccgggcggacccatacgatattctttaagcgcaggccgagagaatcctctgttgccccgccgatgcttttctccgccgcggcccgtgccatctcaagggtgacggcagccggcacgatcgccattcctttaatgatatgctcggcaataaaatactcttttcccgtaaattccgaactgaaccgctgctcctgcaagacggatgtattctgatgtaccagcggatgcaaaaacttcgcatctgtttgcttcacagtttcttccggccagaagcgctcctctgcgaacgggtaggtcggcgcactgattcttcgcggcgcggaatcctgatacaataagccccaatcaacacgcgctccttcaatccagagcgccgcaagtgctttcagcttttcatcacgtgtctgacatgccgcaagctcttccatctcctgagccgacacttctctgcttctcactttttcgccccgtaagatgttttggtcattgccgttgatgaaatcctgcagctgacgcttcagatcgtgacgatcatgactgataaaaacggctctctcttccatcgcttcacgtccggtctgatacgtaaatgccagatcatgcaaggaaacatcgttttcggcttcatccagaaagccggataaacaagttgcataggcagtaagacgttgcttatttctcgctgacagcggaacgatataaggcggctgtccgtcatttgatccgctgatcgttttgttttcatactgttcaaaaatggcgtgtgcgtttgttcctccgagtccgaatgagcttaacgctgcccggtgcggcgtctctctctccggaagcgattttctcttatccgccacataaaacggcgaaccgctgaatttgatattcggattcggtgacgtgtaattaatggtaggcgccagctcccgatgatataaactcatggcgactttgatgcacccggccagacccgctgctgtatccaaatgcccgatattcgtttttacggagccgattccgcaatactgctcccggtccgtgtaacgtttatacacttgctgcagcgcggacatttcaatcggatcacccaatgtcgttcctgtgccgtgcgcttcgatataggaaatcgtctccgggtgaatattcgtgctgtctaaaacatgctggatgacgtcagtctgaccttttacactcggtgcgtaaaaaccgactttatccgctccgtcattgttcagaccgatgcctctgagcatggcgtatatgtgatctccgtcctgaacggcttgcgacgcctttttcagcagaatgacggcagctccttctccgcccgccataccgtcggctgaagcgtcaaatgccttgacatgcccgtcgcttgaaaaattcaatccgttttggtgcacatagccgatgcttgtcgctgcatgcagcgttgctccgccgacgagcgcgtattccgattctccgctcgtgatgcttttataggctgaataaagaccgactaatgatgatgagcaattggaatgaacgaaatagcttggcccttttaatccgagcttatgggaaaccatcgtcggaatcgtgccgctctgcgctaacacccatgagacatagccgtcaggagattcatggccttctgtcgttttttccggtaaaagcgaccgatacgaattattgcttgccgacatatatacgcttgtcttcggaatctctttggatacatatcccgcgtcctcgacggctttccaagaatgtagcagcagaagccgaagctgaggatccataaattctgcgtctttcggagaaatgtgaaagaactcagggtcaaagagatcttttccttctatcgtcgataatgccggcacatagtcgggattttcgatcaaatcttcaggtacgccggcttcccgaagttcttcttccgagtagaaccggacgctttcctttccttctcttaactgcttccaaaactcatgatgatttttcgcgccggggaactggcaggaaatccccactatcgccacactgtcgtcaaagtaagacggcaccccgttttgcggtgtttgttctctttctctctcatcttggcctgatgcctctgattcagccgcctgtttagtttcaacaataaatcggctgatcgcctgaatggtagagtgttcgaataaatccgtgacggtaaaatcgcattccagctcctgtttaatgcgttctgccgccgcaacagccaaaagcgagtcgcctcccacatcgaaaaagccgtcttcggttttgatgcccgccgtattcagcaggtcttcccatattgcggtcactttcgcttccgcttctgataacggcagtctgcccgtcttttcagaccggtgaacaattaccttgcgctgttttaggtctttgcggttcacttttccgctcggtgttaacggcagcgcatccagacggataaaatgggcaggcgccatataatccggcagactcgataaaagatggttgcggagcgctttttcatctgccgtatgaccggagcgggccgtataataagcaatcagctttttatgtccgttcttttcctgaacaacaaccgcctgatcaagaatgtccggatgttcgttcaatttcgtttcaatcgctcccaattcgatgcggaagccgcgaattttcacctgactgtcaatccggccagcatattctatatttccgtcaggcagccatctggccaaatcacctgtcttgtaaagcttttctccttcactaaacggattatcaataaatgatgccgccgtcagctcaggctgattgtaatagcctctggccagaccggcgccggccacgcaaagctcgccggccacaccgtcagggacggggctgagcttttcatcgacaatataaagccgtgtattttgaatcggtttcccgatcggcgtattcctgcttgtgatttccttttggccgcagctgtagtaagcggcataaatagatgtttccgtcgggccgtatatgttttcaattctggcatgtttgaagatggaaacggccttttttactaaatctttcggaaatgcctcaccggccaccatcacatatttcacagggccgtcttctgtaaatgccgtatgccgctttaccgtttccagaaatacattaaacacggcgggagcaaaattcagatgcgtgacctggtgggtttggatgtattccatacaaagctgcgggtttttttctgcaccaggcggcaaaatgacaagccgtccgtttccgataaaccagccgaataattcagaaatcgaaacgtcaaatacgtaattcgtttttaacaaataggcatcctcttgcgcgaccggatactcagcttccaaaaactgcagcgtattcatgatggccctgtgctcaaccatgacgcctttcggttttcccgtgcttccggacgtatatagaatataagcgagatgatgcggttttgaacgcggcgtcagttttgccccgctgacagaacgtccgctcttttcaatttccaccgtgctcacaccgccgacggccaactgttcaatcatgccgcgcgtatttgcttgcgttaatacgattgaaacgccgctgtcagtcaacacgtgcgccatccgttcgtttggaaaagccgggtccagcggcacatacgcgcctcccgcttttaaaatggcgaggatgccgatgaccatctcaaaagaacgctccgtacaaatgccgaccgggcattccggtgtgacgcccttttcttgcaggtacacggcgagcgccgtgcttcgttcatctaattcgcgatatgtaagactgttttcaccgtatgtgacggcttctctgtcagggtggcgtccggctttttccgcaaacacttcatgaatgcagcgctcattcggctgatgagatcggcttgcttcacgtttttgattgagcaggccggaacaggcttcaaaagcgatctccggatcagaaagcaccttttctgccagtttcatataatgctccgccatccgttcgatgaaagaagggctgtagacatccgggttgtacagaaattgcaggacggttcccgtttcttttttatagacttcaagcgcaagctcaaattcgccttcctgatgaatgtcttctatcatttcaatgccgagtgattgatatagttccgccagcttttccgctccttctgtccggaagaagttttgatagaaaaacgcggtttgaaaaacaggcgaaaccgcaggcgagcgttccgtcttcaattctttgacaagcgcgggaaacggatacgcggcatggtccagcccttctgccagtgtcagctgcagctccttcaaaaacgccgtaaaggatttggcgcccgtctccctgcttctgaccgcgatcatattaataaagtatccgatgacagattcaaattgagcctcagagcgccccatcgtcggcatgccgacgatgacatcttcctgattcgtatattgatagagcagccctttgaaaatagcgagatacacaacggattcattgacattatgtttttgggcgcacactttaatctgccggttcagttcatcaggaagcaagcgctgatacgcctgccctttgcaagtttgaaccgatgatctcggataatccgacggaagctcaagcaccggcagcggtccttccagctgctttttccaataagagagatgcgtttttcccgcttcgctttccagcagctctttttcccatttcacaaagtcatgataatctgcggcctgctgaaccatgacaggttctttgccttcacttgcttttacataagcgtccagcagcgccgacataaacgtcataagagagacgccgtcaaaaataatatggtgaatggtgattaacacaatcggctcccgcttcgcccgccggaatacatgaacacgcaggagcggcccggtttcaagcgcgaacggttcttttgctttttctttaataaacgaaagagcgtcacgcccgcttaattcagaaagatccatttcttcaatcggaaaatgccgatccgtatcttctatctgatacggaaggccgttttcctcttttatcacactggtcaaaatagggtgctggcgctgcacggacaaaagggcgtttttgaatgtctcgatatccagcttttgaaaacgaaagcataacggaatgttatatgcgctcatctccggaaacattttctgaagcatccacaaacctttctggccttcagaaagcggacgttttgcagttgtccgcttgaaagcctgaagcttttgttctacttcagcgatggtgagcgttcctgatctgtaggcatcgagaagttctttatgattcataagtcttactcccttctatgatgtcttgcactcttttaaaatctaatgtcccctcagagacctgtttcatcatggcgatgatctcctgatccgtgtactccttgttacccggagcggcggcttttgtttcagtttcttccgttcggtaaaacgttttgatcgtttctttgtgttctgtcaggtaatagctgatgacgtctccgagcgtggcatagctgtaaaataaagccggagtgacttcaatgccgtaatgactcgacaaaagagcggcaaatttggctaaatagatggaatcaaatccgaattccgcccagtttttatgcaggacgagtttatctttagatattttcagcagactgtgtatcagctctttcaaatccgcttcgagccgtttttccgtgctttcttccgggatgcggcggctcacggtttccaaaagcgcatccggttttgatgaatcgtcccgccgtatgcctaaaaatcgttcggcgcggcttcttttgccggcaatgacaaggcactgggtgttgtcttgagaaatgatgcgctcaaacagctcaatgccttcatctgtttctaacaggcgctgtccgcttgattgcaggtacatgcccgtcgtctcttcaccgccgacggccattccgccgtttttccagaccggccagtttatgacaaaagcgtttccgctttcggattgttcgtttttatagcgggcatacgccatttggaacctgttcgcgaccgcgtaatcacagcatccaaaatctcctaaaacagcagatgtggatgaaaagtagcagatgaaatcaggcgtttcgtttttcagccactcgtcaagaagcaggctcccgtttattttcggttcaagcgtactgcggaaattcctgatttcattttcaaagacggatgttctgctttcgatgcccgccgcatgaatgacgccgtgaatagctccgaatcgttctttcgcgcgcttgatgcagtcgcccattccgatcggatcacaaacatcggcttcggcgtaaagaacacccgcgccgagattttccaggtctttcattttttctttcttttcttcattgatcggcgaccgccccgtgagaatgacatttgcctggtagttccgggcgagatggcgggcaaataagtagccgagccctcctaatccgcctgtaatgagatatgttccgccggttctgatcctgccgttttctttcgttagtccggttggttcggtgtgatagacatatcgttttccctcttccaagaaaacggtatggtctgtttcagctttcagctcgtcccaaatggttctcatccagtccgttatggccgcgccggcttttcggaagtggccggtaacacttgttttcggaagaacaatgccgagcgaacgctcaaagccgatccatgattccaagtagcacctttccagaccggatgcatattcccccgccaataacagcctttccggctgcagaccggtctcagccattgctttgagaatatggacaatacatgaataatcttcgatgcagcttttatcttcaagcgcccataaatacaaaatggcagaagcttcaccgtactctttttgaatatccgcaaaagcgttcacatatgattgcggatcttcccgcaccacttggcagcggccggcggacaaggcctcataccggtctccctgagcgataaaaataacgtcaatgtcactgtcatacgatttgatcacagagacggcttcctgctgcttcttctgatcagttaagaaagaaatcaccgttttgacttgcttttctccggcagccggcagagcctgttctttaagaacttctctaaaagccattacttcaaactgctccgccggatcactttcatcagccggcgccttaacgggcgcggccttgctttgtacaggctgctgatgccagaagcgttctttcgcaaacggataagcaggcaggctgatgcgggccggaggacggtctccgtataatttcgcccaattgatgtccaatccttttacccaaagctcaagcagcttagaatatttccgtttgctgatccaagcgtctatgatggtttccatgtcatcatcggccgcaaatacggcaagcatccgtttgttttcttccgtgccgtcacggtgcagtccggcgctgttttgtccggcgataaatccgttcagtttttcctcaagttcatgaagtgaatggacgataaaaccgagacgctcttccatcggcacccggccagtctggagagtaaaggctatgctcataagatcgcggccgctgtatcttttttcacggatggcgtctctgagctgttttgctttttcagtgagccgttcgctgtttttcgcggacaggacgatgatggcgggctgatctgccggcgtctcatcaggctctttgtctgccgtatattcttctatgatgaggtgggcgtttgctcctcccgcgccgaagctgcttaaccccgcccttctcggaagctctttgccgccgatgacgggacgtttccactcaccgagctcctgctgaacggcaaacggcgtatacgcgaaatcaatatttgggttcagctgttccgcgtgcagggacggcgcaatttggcggtctttgagctggaataatatttttgtcagacccgcaatgcccgctgcgctttcgcaatggccgatatttgattttgctgagccgatggcgcaaaactgtttgtctgttgtatcctcatcaaatgctttcgttaatccggcgatttcaatcggatcccctaatgcggtccccgtgccgtgggcttcaatataactgacggtgcgcgccgggacgtttgccctttcgaaagcttcttttattaaggcggcctgcgcattcggattcggaacggtgtatccgttcgttttgcctccgctgttaatggcgcttcctttaatcacaccgtaaatgtgatcgttgtcggcaatcgcttgctccaacggctttaatacgaccgcgcccaccccttctccgtctacaaaaccgtccgcgcggtctccgaacgatttgcacgtgtcgcttgcggaaagcatgttcatgactgacagattcatataatgaatcgggtcggtcactatgtttacgcccccggcaatcgcgcattcgcttgaaccgctgtatatgctctcaagcgccagatgaatggctgtcaaagaagaggagcaggctgtatcaacggcaatgctcggcccttggaaatcaaaaaggtaagataccctgttggcaatggaccagtagccgtagcctgtcgggtagtttttgttcatcgcgccggcaaaaacaccaatttttctgctttggcacaggttgtcaggcgtatagccggcatcctcgatactcgcatacgccgtttctagaaataatcgctcctgcgggtccattcgctccgcttccaaaggagaaatctgaaagaacagcggatcaaacttgtccatatcctcaatgaagccgccccatttcgtataaatagagccttctttacctttctcttcatcgtagtaatcctgccagttccagcgttcctgcggaatttcttctatgcagttttttccttttttaatattggcccaaagctcagccgctgtttttgcctgcgggtagcgtcctgaaacaccgatgatggccacgtcgcgaaccgaactttgccggacggtctctctggctgcccgcttttccctccgccgccagtcagtgcgaagcggcttggccggctgtacagcctgcggttctggtgatgccttccgttcttcctgaacaggcgtttgtcccgtcagtttgatcatcgcgtcttttttcgttttgattaagtgagcgacgagcgcttcgatcgtctgatattcaaaaaataaagtgctgctgacttggtccaatacatttcgtaacgcgtttgtcagctgtacgacgacgatagaatcaattccgtatttttcaagcggcgctttcggatcaatttgagccggcggaatttttaacgtttctccgattaacgttttcaagtactcggtgcttttttctgttaaagacgtgtcgcctttttgcaccgttgtttgcggcgctttaaattccggcgcttgtgctgcttttggcggagcggtccgttttccggcccctgctttaagcgttttttggcggacaacgccgttgctttttgccgctataatctgatggcttaattcatgtgccgcttctgccgggaagaagacagaatgccagccttcactttctaacacgcgcttccagctttccggatacaagcccgggcaccccggaatacgaagggcagaatcttcatgcagccaccagccttcaagcagtccgaaagtaatatgcgggaacaggctgtttcccgccatttcatttaagagcagcaaaccgttgtcttttaagacggctttagcgtttctcagcgtctggcggatgtctttcgtcgcgtggagcacattggcggcaacgacgatgtcgtatgcgcccggctctatgtcctggccggcaagcggcgcttctgcgttaaaaagcttatacgtcagataaggattccgtttgccgtattccgtctccgcatgcacgagaaaagctttcgatacatcggtgtaacagtattcttttatatggttttgatacggcctaagcttttcaaatatgcctgcgcttgtgccgcctgtgcccgctccgatttccagtatgcggatctcggcttttgaatgtttgctgatgttttctttcacataagccgttaatgtttctgacagggcgctgttaaagtaatccgcgacttgattgtgcttataaattccttcaacaagttccattgaagagtgcgggaacatgatgtcagtcgccggcacgtcttcgcgcagaatgtccggcagtgctttaagcatcgtctcggctaaaacagtcatcgcttttgtatcggcgttattgagccattcctctttttcctgctcccatttttgccatagcgaggcggttgtgtcttcggcacgggccgacagtttatatgaatccgcattcccttccagataaccatgttccagaaggaaagcgatcgtttgattgagccattttttaaaatattcgtgttcgggctcatacgctttaaggctttgcggcgtcagcaagtctgcttctttaagctgggcgatcaaaagccgatacagaaaatcatcgagcttttgatgttcagcctcttttacaagacgtgcgccgggcggagcggccttcagctgttgtgaagagacaagcggctgagacggataaacggaaattttttctgtttcactcatcccttcgactgcgaccggttttgtcgtatgaatgaaagctgcttgatcaaccggcagcgtcataagggtttcaagcgcctccatcgcagcgtccggttcgatcaatcccaatccgatctgatccatcagctgaataaaatcgccgtcttcagccgcttcgctgttgccccaatagccccaattcatgactttgaccggacaattccacgtctgatcaagttctttcgcaaatgcgtcactgaaagcgcatcctgcggcatagtggctttgtttcacgttatggataaatgccacaagcgaggagaagaagagcgcaaagtcaagcggctcccgtccaaatacctccgccatggacacactgacatcggcttttgcccgcagcaccgatttgaactcttctgtcttcatattatttaagctttgctcagacagatccattgccgagtggatgattccgttcatttttgtgtgacgctcttttatgaactgataagcccgctctaaggaagcactgtcagcggcatcggcggaaacatattcaggcgccgggccgaatgcgctgagccggtcgagtttcgcctgtatggaatcattcagtgtgcttcttccgatccaaatgatatgtgctttgtagcggcggatcatgtattcactccatgcctcgccaagatatccggcgcctccgatcacggcataaaccccgcctgtttggtacagcgtgccgtttttcggcatattgtcaagcggtatcagctgccgctcaaacagctgctgattgcggtacgcccaaatttgaccgttttttccggcagaaagactgagcgcctctttgaccggccagctgccgtccgtttccgtgtcaatcatgcggatattccaatgcggatattctttcgccattgttccggcaagtccgctgactgcggcctgtgacggggcggcgctgtcttgatcggaaaacggctgggcatttgctgtgacgatgcaccagtccaaatgtttttctccgtaccccaaggcaagtaatgctttcatcagcttgaacacatgaagaacgtttctttcctgttccttgaggctgcaagcactctcagcctgcggagcaagccaaatgatttgctccagctctttttgtccttcaagcatgtacgtaagagatgtgatatcatccgtacctctgatcggataataggaagcgttcggcagatgttcttttatgcgcgtatgcgttctgtcagtttcaccgaaaaccgcagtctgcttttccgctgtttttgctttcttcgttttttcaagtgcaacgggctcccatgccggaatcagcatcgtatggccgacaggcgcttccggggtttctccgcccgctgtttggcctgtgtcaagcgcccggacggacgcgcctttcatccggacataaaccgtaccggcatcatcgcacatatcaatgtcaaattttcttacgttgtcatctgctttgctgccttctgtgtaccggatatatgaccagatatgttcaggacacggcccgaacacttccacttcctgcatcgcaaacggcagagaaagctcgtggctgtctgcatcgtcatgtattgagcggacaagcagaccgacggaggcgtgaaaagcggcgtccatcatactcgggtgaagcgtatactgttctttattgtcatgtacggcagccgggagtgaaatacgggccaataatcggtcttctccgatcagcaattgctgtacgcctctgtatgcctctccgtaatccagaccgatcttctcaaaagcaccgtaacattcttccgcagtcacggtccctgaattgcaggaagctttgacagactcgatatcaatctgggcgctttccggttcggtaatgaccgcttcaccctggctgtgaataaccggatcttcgccgttttctgcctcactgtatatttcataggtaatctcaccattatcttctgggtaaagggcaatatgtatttccttcggtttgtcttcaatcatgaccggccggacccaaacaacctgcctgagtgtgacgctatggtctttttccgtcacggcagcagcctttttaaccgcctctctggccatttccaaataggcaacgcccggcagtattttttgtccgttgacgacatggtcagataggaaaaattcatctccagtaaaaagagacgtgaagcgctgctgcgaaaaatctgacgtgttttcttgtaaaagcggatgcagcactgtgcctgacgggcttttctcctgttttttctgctgcggaatccaatagcgttcttttgcaaacggatacgtcggaacgcttgttttacgcggtttacccgaagcgtacagcctattccaatctattattttcccttctgcccataactcggcaagccgtatcggatcatccgtctcgggagcggtttcgctcagttccggcagctcggcttgtccgcgccaaagaccggggatgttttcgtttccttttacgaaatcattcagcttttctttcaagtcgcggatgtcatttacaaggaagacagctctctcttccattgcttcacgtcctgtctgaagtgtataagccagttcagacagcaccgtcttttctgaaagcgatcgggctagtttttccgcataggccagaagcctgtctttatttcttgctgacagcgggatgagttttgctgcattgttctcaggtgcaggcgctttttgttcaggctgaatgtattcttctaaaatgatatgggcgttcgaacctgatgcaccgaaggaactgagtccggcccggcgcggataatgtgtgacttttccgttttcttcggctgccggctgcttccacggagcagtctgctgctgtacgtaaaaaggagatccctcaaatttcaggtaaggatttaattccgcagaatgcagtgatttgacaagcgttttgtgatgaagctgcagcgccgcttttgttaacccgctgatccccgccgctgattctgcgtgaccgatatttgatttgaccgaaccgatggaacaaaattgctgatcctgcgtcccttggctgaacgcttttgacagaccttcaatttcaatcgggtctcctaacgaagtacccgtgccatgggcttccacataactgacggtccgcgggctgatacctgcttttttcagacaggccttaatgacttctgcctgtgcagcaggactcgggacggtaattccgcttactttcccgacgtggttaacggcgcttcctttaatgaccgcgtaaatgcggtcgccgtcttgttcggctttttccagcggcttgagcaagaccgcaccgactccttctccggaaacgtagccgtccccgccctcgccgaatgtgcggcagcggccgtcacttgagtgcatccctacgcttccgtagctgagatatttcgccgggtgcagcgacaagttcacccctcccgcaagcgcggcttcacattcgccgcggcggatgctttcaatggccagatgaacggcggtcaatgatgaggaacaaacggtatccaccgcgatgctcggcccgtggaagtcacaataataggacactctgttggcgatctgcgcataattcagtgaaaccggaaaaggatcagcttcagataattgttctgcgccgattaaggaataatctttatgcatcacccctgcaaatacgccgatcggatgctgtttctcccctttattccccagcgtttcaggcgtataccccgcatcttcaatcgtttcccagcatgtttctaaaaacaggcgctcctgcggatccatcgtttccgcctcacgcggtgagattctgaaaaactgcggatcgaaacagtcggcatcgtcaatgaaaccgccccattttgatactgtttttccagacggggacgttacgttttgatatgttttccaatcccatcgggacttcggaacttcagtgatgcaatcggtgcctgccttaaggttttcccaaaactccgccacacttttcgctttcggatagcggccggccattccgataatcgcgatgtctccggtgtttttatgatgttctggcgcgtccggcgcttcagcttcagatcgtgatgattcggctgcacgttcctccgcatattcaaatgaaccagtctttttcagaaaggctgcgagttcttttatatttgtatattcaaagagaagagtgggcgcgaggtcagcacccgtctttttactgatatcctgtacaatctcaagcaaagaagatgaattcagtccaagctcgtagtagcctgcaagaacgtccagcgtctcccaaggttgcccaagcttatcagccaaaagcttctttaaaaacagaatgatgtctttttcatctgcgctttccggctcagctgcagcctgttgattctgttcggctgtattcgcgtcttcgagccgaaccgcttttcccgtaatgtttttaagctccgccaccttttgtccggatcggctgaagtactcgatcgtcatcgttgtgagttctttttcctgacggacgccggaagcggcgatacgcgccgtgcactctgattgaagcctgtcagcggccgtgaacgattcataatataaaggcaggtgaagccggtttgtttctgaaagcaaaccgctccccccgattccgctcgcatccaaaagggccggatggaataaaaagaaatcttttccttcttcgcaagaaagctcagccagcatgccgctttctgtttcgtacaattgtccatttgatttcatcatgccggaatgaaccaagtcatgatccagacagcggttatacatatcatcaagattcagagacctggctgactgcttcacatcgctgaaatcaatgatttcgtcaaatgtgacagcgtctcttttcaccatttcagccgtcgcatattgtatattgtctgacagctcgtcaccttgctgtttctgccctgaaagggagatgagccactttccatctccgctatcagaacattgaatggtcagaatgattgcagccgtttcactgacggttaaaggctgataaatcgtaacgtgcttcaattcaagctcattgtatacataaccgtgttcctgaaaaacctgataaatcaaatcgatataagcaagaccgggcaataccgcttcaccaaagaccatatggcccttcatgatgggatgatccagtgagatattgattttttccgatatcattccttcccactcctctcttatttaaatgctttccaaaacatttttttcgcaggaagctcttgtttctccgctcgtacgtcaggttcttttaccagagccttacgtcttaatgacggtaccggcagcggctttcttttcattcgggtatctttttcttcccaagcttccagaatgacgtgggcgttcgttccgccgtcggcaaagcagttgatggctgctgacggtctggctgcatcccattcgccggctgttttatgaaagtgaaaatctgtctttgttatatcaaaatgcggcatcggttcgtctcctgagagaaacggaaccgtttgtttatgcttcagcattaatacgactttaatgaagcttgcaatgccttctgcgcaaagcggatgcccgatgttcggcttgattgacccgatgccgagcggaacatgctgacctgagcggtatacggattgaatcgccttcagctcaagcaaatcagtcaccgcggaacccgatccgtttgcttcgatataagtgatgtcttccggctttttgccgcttttgagaagcgcgctttgcataacgtctttttgcgcctgcatattcggggctgacgggcctgccgttctgccgtcattgttcatggcggcagccttaatgaccgcgtgtatcgtatcgccgtctttttgcgcctggcttactgtttttaacagcaccatgccgacgccttcaccgaggaccactccgcctgaacgcttgtcaaatacgtgaaatgccggtttctcgtttaacagcccgcgctcttggaacatccggtgcgccgcatccgtgttcagcaggctgacgccgccaactaccgccgctttgatatcgccgcttctcagtgcctgaacggccatgttcattcctgtcaaagctgatgaacaagccgtatcaagcacgatactcggcccgcgcagatcaaaaaattgcgaaacgtttgccgctaaataattctgcccgcccgcaacaatcgggttgcgggtattcgcaagactttcaggatcaggctgatgctggctgcggcctccgatatacacaccggcttctatgcccttgatttcttcacgggtatagccggcatggcaccaaagtttcaagctctcttccagcaccgccaacgcctgagggtccatcgctttcgcgtcgttttccggaatgaaaaagaattcggaatcaaagtgatccatattgtcaatcaatcccgcaacatattgatttgcatatccgaaacgttccgccgggacggagccgattgcggacctgccgcttctcagcaagtcccaatattgttctaacgattccgctcccggaaaacggcagctcattccgacgacggcaatgtcttcagttacagcagcacgcttttgctcagtgtgaaccgtttgtacggcagccggaaccaacatttccgtatcaggttcctccctttctgcaagcagcggctgcccattggatacaagccattcggcaaacgcgtcaatcgtcggatgttcatataaaacagacggatctaagtcctctttgagcgcttgattcatttgctgtaaaagctgcgctaaaatgatcgaatcaaccccgtaatcctgaaacggttcgtctgtttccagatcttccggagcgattttcagctcatcggaaaacagtttcacaagccatgccttcgtatcaagaagcagttctctgtctgaatgtttttccgcgtctttgccgtttattacggcttcagtctctttttgttttttctcttgacagagcagcctgtcgggatgccattcgctccgatcaacgatagccggcagaacggacgggcggatgttttcagataaaatgcggtccagcaagtcaagtccttccgcgttggacagtcccagcagcccggtctgcttcaggttttctgtgcggatttcacccaatccggtttccttccagttcggccattgaatgctgactaacggatattgatgctgatgagccgccgcgaaataatccatgtacgcatttgccatcgcataatccgactgtcccgccgcgagtgccggaacgactgcagatactgaagaaaataagacaaaaaattgcaaaggatcatttgtgaaaaggctgcttaatgtttgaagcccggcgactttcggttcaagcacttcttgtatgtcgtcggcagtctttctgataaacgccggatttactgaattaaccgatcccgcacagtgaatgacgccgccgatcggtcccatcgtgcgccggatcgtttcaatttccgctgccgccgcgtcatgatcagacaatttcagactgatcaccgccacttgcactccttttgcttcaagctcttcaatcgcccgtatcttctctctcagcctcatattaacggctgtccgtttatgacggggaggaatcggctccctgcctgtcagcactacttttttcacgccgtgtttttctgtgaaatggcgggcgcataagagacccagtcccctcgtccctccggtaatgaaaagcacatggtcttcaggaaacggtgctggcttatgttctgctcgcttcccgcttggaatctcgctgaacaaagcacggtatctttgtccgtttcggcggcagacttccggttctgtgctgtccgccgaaaattcatctgcaatctgtttggcaagcgtctgctgatccgtatctgtatcggtatccatgtgtctggacgtcacgttttgatactcattttgaagcattctgtacaggccgctttttgccgctcctgcaagatgaatcgttttctgctgaaatggctccaagccttttgttacatatagcagcgtcagcggccgcgcttgccggcggcttgtatcaatcagagtctggagccggctgatcccttccagtgaagggtcttcgtctccgcatcccgtcagatcgattacgccatctatgtgattccaatcgctagctgcagtgtcagcggccgggagaatgaacgagtcagcgaaatgcttcgcagtctcttcggcaagttccgctgttcttgcatcagccagaatcatgaccgtcctgccgcttttctcaccggccgaatcgatctcacacggaacccattgcttttctaaaagcacagccttgcgccggtcttctgtttcctgcggtacggctttcggctcaggcagccagtacggctccttcgcaaatgggtaagccggcagactgattctgcggggtttttcgccttgatagagtctgtcccagtccgtctgaagccctttggcccacaattccgctattttggcgtattttttcttatcgaaccacgacctgacaagctgcttcagatcatcgtccgtttcaaatgctttgatttctttttttgccgttttgatgtgggcttcatatatcccttcacccgtatttccgtttacaaaatcggttaaacggctgatcagttcttctctcgaaccggctgtaaccgcaagacggtaatccatcgcatcacgcccggtctgaagcgtgtatgccatatccgaaagattgatattctgattggcttttgcaaattcgatcacagactcagcataggtttttacctgcggcgcttttttcgccgacagcacaaaaatgtttgtctcatcagacttgcggcttccccggtctttcggctgatactcttcgataacgagatgagcgtttgtgccgctgtagccgaatgagctgacgcaggcccgccgcggtgctccgcctgtttcccaaggtttaagttcggtattgacaaataaaggcgagtcatcgaaatcaaaatgttcattcggcgtgctgaaatgaagggtcggcacaagctgctggtgcttcatcgacagcagaaccttctgtacgcttgctacacctgccgccgccgacgtatgcccgatattcgatttaaccgaaccgatggcgcaaaattgtttgcggtccgttttttccttgaatacagaagataaggcttctaattcaatcggatccccctgctttgtgccggtgccgtgcatttccgcataggtgatgctctcagggtggatgttgtgcgcttcatacacttgacgctctaaatccatttggcttttcgcgcttggtgcggtaatgccgttggtttttccgtcttggttaattccagatccgataatgactccgtaaatatggtcttgatcggcttccgcatctttcagcctcttcaaaacgagcgcccccgcgccttcgccaggcacaaatccgttcgcactgttatcaaatgctttacattggccgtcaggagacagcattccggcttcacacatgctgatgtatgattcaggcgttaaatacaaggtgacgccgccgacaagggccatgtcaatttcatgattcaacagcgcctgacgcgccaaatgagtcccgacgagagatgaagagcatgccgtatcgatcggaatggccggccctttcaaattgagataataaggcaggcgggccgccgcgatgctgaaactgttgcccgtcgcgcttcctcctgtctgatgtttgtttaacatcattccgtattcattgttcataatccccaaataaacgccgcaattttttccgtttaattcttttgagctgtaacccgcatcttcaaaggctttaaaaccttcctgtaaaaatatccggtgctgcgggtccataagttccgcttcagacggagaaatattaaagaacagcggatcaaactcttcaatgccgtcaagcataccgattgatctgcagtatactttgcccttcttgtttaaggccggatcatagtatttgtttacatcccagcgggaaagcgggatgtcgcggatagcgtttttcgcacgggctaagttgtcccaatatgcctttaggtccggcgcatccgggtacttgcccgacatgccaactatggctatcgcgtccgctatctcgtctttaggctcccgtttggcctgcaccggttcaggttccttttgaaccgttaatctctccggctcggcaggtgttttctcctgcggggcggcttgctgtgtaagcggctttggacgtacgggaaccgcctgtttttttctgccgcggacggacggctgcgtacgcagaaaatcggcaaattgacggattgtcggataatcatacactttcgttacgttacagtccgtgccgtaccgtttattgacggcctttatccattcaagaccggtaatcgaatccataccgaggtcaataaaggcctcatcaatatccacttcatgccgctccatgtacaatacatcagccagtgcttttgataactcgtcatgcaccgcttcaatcggttcttccggttcggcggaagctgccgtttcagacatcgcctccagaatatccgcttctgcttgtatcacatgctgcttatgagcgtttaaaggctgcagcagtatgtttgacggtttttttacggcctctgttttctgcggttcggctgcttcctcaaggatcggttctgtcccgagttctttttgcaagaaggccgcaaactggcggattgtcggataatcatatactttcgtcaccgtaagggacgtgccgtacgctttattaacggcctttatccattcaagacctgtgattgaatccatgccgatatcaataaatgtgtcatctgcgtcgatatcgtcggcatccatatataacacgtccgccaacctttccgttaattcggcacttactttttcagcggataccgccggacgggaagcagactgtacggttcttttcggtttcgcgccgctcaaaggctgcaatgaaatgtttgacggtttttctttggcagtctcctcgtgaagagttgctacttcaatgaccggttccgggacggccgccggtgcgatcggcgcagactgtgtttcggccggtcttttgacagctgcatcagctgatgtgtcgatccaataacggtcttttgcaaacgggtaggccgggagactgattttttgcggtctgcccatttgatacagcttatcccaattcagcggaaggcccttcacccaaagctctaatacctttgcggctttgcctttttcaagccatgcctcaatggttttttccatgtcctcatcagccgcaaacagcgccatcgtgtctttattctgtttgacttgtccgcggtagagccggtcaattgactccttgccgcccgtaaattcgtcaagcttttcttcaagctcgcgcaaattgctgacaatcattccgagacgctcttccatcggttcacgtccgatttgaagcgtatatgcgatccggctcagatccgcttcttggtaacgcccgctccgcagcgcatcaagaagacgttccgcccgtttttgaagcctttgttcatttttcgcggaaaggacgatcatcgatggatgaggagcggcaaaagccgtctccttatcctcatcagcggtatattcttcgatgacgatatgagcgttgacgcccccggctccgaatgaggaaagccccgcggttctcggcagttctttatttattccgttttcatttatgaccggtcttttccactcttcaagcgtctgctgcactataaacggcgtagcgagaaaatcaatattcgggttaagcgtccgggaatgcagtgacggtgcgagcttcttatgtttcatttgcaggagcaccttcgtcagacccgcgatgcccgccgcgctttcacagtgcccgatattggattttgctgagccgatggcacaaaactgtttatcttgtgtttgttctgaaaaggcttttgtcagacccgtgatttcaatcggatcaccgagtgaagtcccggtgccgtgggcttcgatgtagctgactgccctcggatcggttcccgcgtcttttaacgcctgtttgatcaccgcggcttgggcgttcggattcggtacggaatacccgtttgtttttccatcatggtttacggccgttcctttgatcaggccgtaaatatgatcaccgtccgctttcgctttagaaagcggcttaaggagtaccgctcccactccttcaccgggcacataaccgtccccgccttcaccgaaactttcacatctgcctttgcttgataaaaatctgttctggccgagcatcaaatatttattcggatgaacggatacattgacgcccccggcaaatgctgtctcgcattccccgttccgcaagctttggcatgccagatgaatggctgttaaagaagaagagcacatcgtatccagcgccatgctcggaccgttaaaaccgaatacataggaagccctgttcgcaattgatgacggatttccggtcagcgcaagcgattttccgcgcgcctgttcttcggctccgtaaagctgatattcctcatacatgacgcctacgtaaacaccgacattggcgccaagcaaatcacccgatttttccgtgagctttttgcgcgtgtaaccggcatcttccatcgtttcgtagacacattgcaggaataaccgctcctgcgggtccatcaattttgcatcccgaggcgaaatagagaagaattgcggatcaaatttgtccacgtctttcaaaaatcctccccattttccgtacgtcttgccttctttatctttatcagcgtcgtaataaagactgtgatcccagcgatcgtttggaatttcagttatgcagtcagtgccttcactcaagttcttccaaaattcctgaagattttcggcttgcggatatcgtcctgatataccgataatcgcgatatcttcacgctccgtcactggatttttccgcgtgtctgtgcggacttgcgcaaagccttttttggcttcattccgtttggaaacgggctttatttcggctttttcagacagcgccggtttggctgcagaggtttcttctgttttcagcccggtcacttccagcagcgtgtcccggtgtgctttcataaaatactgcgccagcgattcgatattctgatattcgaaaaacaatgtttttgacaatgaaccgaagctcttttccagccggcccgtcaaatgcataatcataatcgaatcaattccgtaatcttccataggcgccttggcgtcaattttgccgacaggaagttttgttacttccgaaagcacatgtttcaagaaatgctccgttttttctgcaagcatgttctctccgcctgccgtaagacctgccggttcttccgtttcgctgcccttatccggctgatcatccgctgattttttcagaaacgcccggatttttgcggcgtagccttccgtcaccatgatttgggatgtgtttgccgcccacccgcggtacaaagcatggatgccgttttctgttttcatagggaccatgccgctttcttttgtcagcatcgcttccgtttcagcatcaaccgtcatgccgccgtctttccaaagcggccagcagattgaaagggtgtgtccatagcgttcatttcgggcttttttacggtttcttttttcactgaaggcgttcatgaacgcattggccatcgcataatcagcctggcccgcgcttccggcgcttccggctccggaagagaaaagaatcagaaaatcaagctcaatgtcctttgccgcttcatcaagatgaaccagtccggagactttcggcgccagcacatcacggatttcacctttgtgctttttcagaatataattgtcttttatcgttcccgcgctgtgtatgataccgtttaatccgccgtactgtcggcagatgtccgctgtgagcgattgaacttcttgtttttccgtcatgtccgtttgtttgtacacggcttgcgcgccgagatcggacagttcttgcagctggtcttttttacggttatccaacagagaacgccccgttaaaataagcacggcgtcttttgcatgtcgggcgatttctttggcgaataaaaatccgagtccgcccgcaccgcctgtgatcagataaacacctttatccttccacggcttttcggcgccgaactgttcaagccctgtttcctgccattgtgccgtatagcgcttgccgttttcatagcgaatatgtttgtcatcaggatgagcgctgcattcttttacatatcgggacagcgtgtctgccttgacgtccggctccaattcaatcagctggccggtcaggttcgggttttcaagcgccgctgttttcaaaagccccgttaagccgcaaaggagctgcgtatccgcttcttgaggcacgacaatctgaatgagctcgcgcccgccggaatttgaagcgagaattttcttcacttcttcgaacgcctgaagcgcacaagcttcaaaccgttcgtcttcactcttatgctgatcacggagcacgtgacagctgaagtctgtctgtatgctgttcatttgatccgtaaaccggtctgatatcatcacgtgacgggctttgaaatgagtcggcgctttttcatgtacagcggccttctcttcccatacgtgttcaaaaaatagtgtatctgttttatccgtttcaatttcccgtgcggaataaccagtcattttcacacatacattgccttgttcgtcacatacatcaatatccagcttctgcacggcatcttctggcttgctttcgccgctgtacgcaatggaaacccacatatcgcttttacagcttttcaacacatcaatctgttcgagagcaaacggcagcatcggccttatgtcatttccgtctctgtcaagcattaacccgattgtcgcgtggaaagccgcatccaaaaggctcggatggaggacaaactgatcttttgtatgagaaatagatgacgggagtgagagcttcgcgagcactttgctgtcttttgcatagatttccgtgaccgctttgtgagcatccccgtattcaatccccatctgtttgtatgcctgatagcaagcgtcaggtgtgatcagacggcgtgactctcttaatttgtcaatctcgattttggccggttcgccccctcggacaaacgccgcgcttccttgcgcatagagaacgggctcttgttccgaggaagccgattcaccgtaaaccgtgaagcccatctccccattttcttcatcataaagacggagatacagttctgcggattcatccgccgctgtaaacggacgtatccatacgacgtttttcagacggactgttccttcttccttcgtttctgccgcgtgttcaacggccgcccggaccatttccagataagccgcgcccggtaacgtccgctcgtttttgacgacgtgatctttcaggaaaaattctccgccgctaaaagaggaccggaaacgaacacctgacatgtttgatacattttcatgaaggagcggatgcagcatgcctgcccttttttgcggcagcgattctcttttctccgccttcggcacccaataccggattttttcaaacggatatgtcggcaggctgatccgattcggtttgttttcaccgtacaagagattccaatccatcgttcctccgccggtccacttttcggcaatcatctccagactcccggaagaaagccatttatgtatcaagtccggagcaagctctgcctgattgcttttatcggctcggttccgccagcatccgctgaccgttttacccgccagaaagccttccagccgctctttgagctgtgtcatattctgagcggtgaacgcaacccgctcctccatctgttcacggccgatctgaagtgtatacgccgcatcctcaagcggcaggccgggataaataaatgaagacagcttcgcaacatactcttttagccgttcttcattccgggcggaaaccgggaaaatgaaagtctgttcttctgccggttcatacgctgttctccgtgattcttcagggataaattcctccagaatgagatgcacgtttgaacctgtcgccccgaaagaactgatgcccgcacgccggggatatacggtctcgtttccgttttccgtcactgatggctgctgccatgcttcggtatgatgctggacgtaaaacggtgattgttcaaaatctaaatacggattcagctcctcggaatgaagagacggcaccaaagttttatggtgaagctgcagggcaaccttgcttaagccgctgatgcccgccgccgattccgcatggccgatattggacttcactgatccgatcgaacagaactgtttgtcctgtgtgtactggcggaacgccttgacaaggccttgaacctcaatcggatcgccgagagaagttcccgtcccgtgcgcctcaatataactgaccgtgcgcggatcgatgcccgctttgtccaggcattcttcaatcaaatcggcctgcgcgacaggactcggcacggaaattccgctcactgtccccacgtggttgacggcactgccctttatcaccgcataaatccggtctccgtcttttaccgcctctcgcagcggttttaataaaacggcaccgattccttcagccggtacatagccgtctccgtctttcccgaatgtatgacaaaccccgtctgttgaaaacatgtcccataaaccgtatgtcagatatttattcggatgcagcgacaagttgacccctccggcaaccgccgattcacattccccgcgccgaatgctttccgcagcaaggtgaaccgcagtcagcgaggatgaacagaccgtatcgacagccatgctcggcccgtgaaaattgcaaaaatatgaaactctgtttgcgatttgcgcataattaagagaaagcgggaatacatgatcttcagaagaagcttcagccccgaccaacgtataatccttatgcatcacccctgcgaagacaccgacgcgctgcctcttattccgtccgcgcgcctctgcgagcgacttcggcgtatatccggcatcctcaatcgtttcccagcatgtttgtaaaaacagccgttcctgagggtccattgtttcagcttcccgcggcgtaatccggaaaaattggggatcaaagcaatccggatcatcaataaatccgccccattttgaaatgctctttccggaaggcgactttacattttcaaaccggcgccagtcccagcgagactccggaatttcggtgacacagttttttccttctttcaggttttcccagaattcatgaatattttcggcctgcggatagcggccggccatgccgataatcgcgatatcttcatcttgcggaacactgcttttccgtcttctttctgtttgcttctcaacctgcttctctatttttgcaggagacgcgctgaaatggcttccgtactgctctgtcaggaaagccgccagctctgatgccgtcgtatattcaaacagcaaagtcggagaaagggtttcgccgattttttcactgatcgtttcgacgacgtcaagcagtccggacgatgtcagccccatttcatagtagccgacttgagaatcaatctgttcaagcggcttgccgattttttcagccatcagattcatgacataccgttctgcttcctcatgcgggtgtccgccttcaagcgatgccgcaacttccggtaaaccgactttttcaggaggcttctcagcagtctttcggtctgtattgatcagctcggcatcccgcacgagcttgcttgtgaaatctttcagctcggctacttttcggccggatgtgttaaaaaactccagtgtaatgtaaatgagctctttttcctgccgaagcgacgaacgtttgattctcgtgatgcagccggcctgcaaaggttcggaagctgtaaaagattcgtagaaaagaggcagaaacagcctcttttccccatttaacagcgaggagatcaataggtttgcgccgacgccgcttccgtcaagaagagtcggatggaacaaaaacccttcggcctgtcccatcgcgtcttttccgagcgatacatcaaaggtgacgccgtcccgctcctcaaacacttctccttccgctttcatatatccgctgtgaaccaattcctggcttctgcattgggcatacagctcatttaaatcgatggtgcgttccgcctcgcgtttgacagagtcaagatcaagcgtgtcactgaaaactgcgggtgccgtctcgtgcatttccgctttgacgtaaatacgttcttccggctggactcgtccgccgctgacctcagccccttttgcggtaagtttccagcgcccttcttttacctttgtacattcaaccgtaagcttgacggcgctgtcttctttcgcgataagcggctgatatatggataaatggcgcagctgaagcccgtcgtatgaatagccgcgctctttaaaaatctgataaaacatatcaatataagccaatcccggaaggactttttgtccgtaaacgtcatgatgtaaaataaacggatttttcagcgataaagtgatttgcttattgaagttcttcacgttaaacctccacttcataggtatcccagatgtttgccgcagctttttcgttcgtttcttctttgctgtccggcgaaatcagccgcttatttaatgcaggcggtgttaaagggtggcgcttgattcggcgcccttcgtctccctgccacgcttccacaatgacgtgggcatttgttccaccgtcggcaaagcagttaattcctgccgccggcattggtgacggccagtctgccagagtgcggctgaactgaatattggccttttctctatcaaaatgtgtgttttcatgctcacctgataaaaacgggataaagctcttttctttcagcatgagaacaacctttatgaaacttgcaattccttccgcgcaaagcgggtgcccgatgttcggtttcacagatccgattccgagcgggccggcgtcttttgaacggtagacggattgaatggccttcagttctaacagatccgtcacgaccgtgcctgaaccgttcgcttcaatatgagtaatgtcttccggctgttttccgcttttttcaagagccgtcttcatgacggatttttgcgcttccagactcggcgtagccgggcctgccgttcttccgtcattattgacggatgccgccttcactacggcataaatagaatctccgtctgcaatggcctgagacacggtttttaaaagaaccattccgacaccctcgcccagcacgactccatcggcgcgttcgtcaaatacatggaacgactgcgctttacttaatatgccgcgctgttcaaataatttatgggtttcttctgattcaaacaggctcacaccgccgacgacggccgcttttatttctcctgttacaagagcctgcacggccatattcattccgactaaagcagaagaacaagccgtatcgaggacaacactcgggccgcgcatatcaaaatattgagagagattggcggccaaataattctggcccagcgcgacgatcgggtttttcgcatccagcagtttctcttcacccggtctgtgacggctgcgtcccccgaggtacacacctattgcttctccctttatctcatccggcgtatagcccgcgtgataccacaggttaagacattcttccagagcggccaaagcttgagggtccattgcctttacatcttcttcagccagtaaaaagaagtccggatcaaattgatgaattccatcaagcattcccgcgtaataaggcgtcttcacccccatcgctcagccggaacaggaccgatagccgaacggccttcagccaaaagcgaccagtacgcctctaaggaagccgcccccggaaaccggcaggacatgccgacgaccgcgatatcttcccggtgaatctgtttttcggccgcctcttcttgcaccttaacggcttgtgttacaattaccggctcagccggcttcttcataacaggctcagccgccgccaaatcaaaccgttctgacaaaacttctgtatacccttcgagaagccattttgcgaaagattgaatcgtcggatattcatacagaatggacgggtcaagcgatgccgagagattccgattgatccgctgcagaagctgagcaaggataatggagtccactccgtaatcttggaataatacgtctgtctcaagctgatcctggtcaatccgcagctcttcagaaaataattctttcagccattcttctgttttccttgttaattgagcgttgtctgcggcggtatcagcggttttttccgccgattttaccatagccgggctcattggctgatcctgcctgctccgccgcaggaatcgctccggcttccacagcttaggattcagaacggccggcagcaccgggccccttgctgattcaagaagtatgccgtcaaggagctgtaatccttctgcattcgtgatgctgtatagcccgctctctttataagctttgttcgttacttcgcccattccggtttctttccagttcggccactgaatgcttacgatcggcagctgctctttgtatgagtctgcaaaatagtccatatacgcattggccatggcatagtcggcctgtcctgccgaaagcgccggtatcgcagctgacacagaagagaacaagacgaaaaacttcagcggctcttcgctgagcacactgtataacgcctgaagcccctctactttcggctcgagcacgcgctgtatgtcttcatcggtttttctgatgaatgcgagcgtctctttatcggtcacacccgcgcagtgaatcacgccgccgataggtccgagcgtctgtttgatctgactcaattcctgtctcagcccggcttcatcagctaacgggactgacaataccttcacttgtacacctttggactccaagtcgagaacagcttcaattttcgcttttacagaagccgtcaccccattcagtccgcccgtccactcacttcgcggcggaagggtctcacggcctgtaagcaccagttttttcactccgtaatgttcggcaaaatggcgtgcgcataaaagaccgatccctctcgtccctccggtgatcagaagcacatggtggtccggaaaatcaattctctcgccttgcgtattcatattttctgaaccgctcaatacggcgcggtagcgcaagccgtccctccggcaaacttccgcgtcatcagtacgggcatgaaactcatcggcaatctgcttcgccagtttgtcatccgaaagcgctccttcaagatcgagatgccttgaagacagatgactgtactcgcatgccagcattctgtacagcccggcccgttttgctcccgttatttgattggcctttttccccattgactcaaggtctttcgtgacacaaagcagtgttatcccttctttatgcccatgctcaatcaattgctgaagccatttgataccggtcatatctccagaagcttcttctttcgctgcaccgagaaggtcgatgactccgccaaacgcctgccagtcatattcacctgtaaggtctgatgttgtgataatacggtgattcggcatatgcgctgcgatctcttctgcgagattgatcgtgtccccgcctgtcaaaatcgcaacggaacgtgggcacggttcacgcagttcgagcgggctcggttcccattgttttgtcagaatacgtttcatccgttcctctgtatggaccttatttttgtcaggattctcaggcacccaatacgtgtcttttgcgaacggataagacggaagactgagtaaacgcggcgtacccttttcatacagccggttccaattcaacacgccgcctttcacccatacctctgccagcttggcgaattttccttttttaatccaggcgtcaatgacgatgtccatatcttcatctgccgtgaacaaggcaaacgtatctttattgcggtgagactggccggtatacagcccggcgatgtttttctcatttttcgtaaatgcttccagctttgtttccaattccgccatcgtcgctgcaagaatggccaggcgctcttccatttcgtcccttccggtttgcagcgtataagcgacgcccgccaagtcttgatctgtatacggcgtttgacggatcgctttttgcagctgctgcgcctgttcgaacagtttttcttttgatttggcggacaaaaggatgattgccggattttccgggctgtgctcaggcagagcggctgctttcgggacatactcttcaatgacgatatgggcgttgaccccgccgatgccaaatgagctgaccccggcccggcgcggaatggcatttccgtttctatctttcgctgccgtccattcctgattttcccgcacgatgtagaaaggactgtcatcgagctgaatgtacggattgatcgtctcgcaatgcaggcttttcaccagcgttttgtgcttcatttgcaaaagcactttcatgacgcctgatactcccgcggcaagctctaaatggccgatattgctcttgaccgaaccgatgccgcagcggtgatcggagacttcaggctcttgatttgttttcgccagctcgtgaaacgccgctttcaaaccgtttatttcaatcgggtcgcccaattccgttcctgtaccgtgcgcttcaatatacgtgacggtgctcgggtccactcccgctttccgatatgctttcaccaataaatcagcctgcagtttcggattcggcgaggttaacgtattcgcccggccgccgtggttttcagccgtaccgcggatcacgccgtaaatcggattgccgtcacgttctgcatctgtcagtttcttcagcatcagaattcccgcgccttctcccctgacatacccgttggcatctttggagaaggttttgcattttccgtctttgctgagcatgcctgctttgctgtagctgatatgcgcttcttccgtcagaatcgtgttgattcccccggcgatcgccatgtcgcattctccgttttctatagcggataccgcccggtgaatcgcaacaagcgagcttgaacatgccgtttcaaccggctcgctcggcccgtgaagatttaacaaatagcttaaacggttcggaccgatggaaggaatcatgctgcctgtcgccgcatgtccttccggcgcaagacctgcccttgtgaacaaatctttataaccggtatttccggtgccgataaagacacccgtatttgtgccggaaaggctttccggcttacagcccgcatcttctatcgcccgccatgcataagtcaataacagccgctgctgcggatctaaatattgggcttcccgcggtgaaatcccaaagaacagcggatcaaattcagctattccgtcgataaagccgccccacttaatattcgttttgttcctttcaagattcgggtcgccatcaaacgcttgccaatcccagcgttctttcggaatggttgtgatagaatcttttccttctttcagattgcgccaaaattcctctatatccttcgcgcccgggaatcggccgctgattccgacaatggcaaccgggttcaagcggcgcggctcttgtgtcgctgccctagcgttcatcaccgttgcgaaacgctttttccgatgcgttttcggtttttgggcttttggctgctcttttttcggagactccttcttcttttcgccgaaacggcccggatgctcttttgccaaatatccggcgagattactgatcgttccgtactcaaagaaaatcgtcggcgccagctccagctgatacgcttcatttaattgattcgtaaagacggtaaaggatacggaatcaaaaccgtattcactcagttccgtatctgtatcaatgtcctcacggtcaacttttaaaatgctgcttaccatggctgtcaaagcggtgtgaagcgcttgaagagattcttctgcatcgtgtttttcttccggctgaaaaggaagacctctctctgtttcatccgacaaatactctgctaaactgcggatcgtcccgtgctcgaagaagatcgtcggtgccagctccagctgatacgcttcatttaattgattcgtaaagacggtaaaggatacggaatcaaaaccgtattcactcagttccgtatcaatatcaatctcgtcttggccgacttttaaaattgaactgaccaatctgataagcgcaccgtgccatttgtctcccgaaacggcggatacaggttctattttctccacctgcggcttttcagtttcagaaacggacaggaacgactgttttaattttgctgcgtgtccttcagctgctaaaagctgcggcttttcctgagccattccttcataaaatgcagccaggcctgacgccttttgaagcggaaccatgccgaaagcttttttcatcattctttccgtctcgtctcccgcctgcataccgccatctttccacagcgtccagttaaaggcgatcgtttttccgtgccgcaggccattctccgtaagggattgcctgtaagcggcgtatgcatccataaacgcgttgccggcggcataatcagcctgcccgacattgccgagaacgccggaaacactggagaacaatacgaaaaagtcaaggttgcagtctttgctggcttcatctaaataagcggtgccgatcactttcggatcaagcacttcccagaactcttccttcgttttttgcagcaggaaacggtcttgtatcacgcccgctgcgtgaataattccgttaagctccccgaattccgccgtaatctcttttatcagcgcttcattttcccgccggtctgccgcattcagctttttgtagacgacatttgcgcctgagtcctgaagcatagcaagctcacgctgtttggcttctgccagatttgagcggccggtcagaatgattttcgggtgttttacgcgaccagcgatttcttttgcgaacatcaaccccaggcttcctgcgcctccggtaatcagatatacgccttcgtccttccagacggcgccgccacctgcaggatgcatttcttcccaagccttcacataccgtttttctcctgtataacggatatgtttatcatgcggccgatggctgtcgtttttcagtttttgagcggcagccggcatttcgccgattgattccatctcgatgagctgacagtcaagttttccgtattccagctcggctgtttttaacaaacctgttaaccccgcaaacaattgctggctgccgtctgctgaaataacagtctgaatcagaatgcggccctgccttttttcgctgatgatccgccggatgtgttcggcgattgtctgcgcgtagccttggaagcgttcagcggctgtttctccctcaccttctgcaatcagcagctcggcgtctttcaggccggatgccgcttcatcttttatacggcaggcatcttcacaaagtatgatcaaatgctcatcagcatggacagaagctttctcggatgcggcggcttctttccaaaccggtgcaaacaagaccttttccgagcctgatggccgctgagccgattctgcatcgccttcaagcactctcgtagagaatcctctcaccttcacgcaaagcgctcctgtttcgtcgaacaggtcaatgtcggctttctgcacggaatcaccggtttgatatccttcgctgaagcgtgcatgcgcccgcatagtcggtgtgcatggtttgatgacttcaaggtattccagcgcaaacggcagaatcagcttttgtccggaaaactcctgcataatgcagatcgtcgccgtctgaatagccgaatcaatgatgctcggatgaagcgtaaattgtccgttcgtatgagaaacagaatccggaagctgtatatccgaaagcacttctttctcgccgataaaggcggacttaatgccttggaaggcttttccgtggaacatccccctgctccggccttcccgataaaaggccgccggatcaagaatgtccgctgtgcatctgttttgtatggcagaaaggtcggcctcaggctctcgttcagcctttatgatttcagcccgtccttggctgtgcagcacttcttcatcgtcagcgtttacgctgtaaatgtcatatgagatgatgccgtcctcttcaggaaacagcgcgatatggacttggcgctcttgttcgtgaacgacgatcggtttcatccagacggtatgatggagcgttattctgtcttggtcttttaataagccgccaagcgcccgttttaccgcttcataagacatttccaaatatgccgctcccggcagcaccgctttttccctgaccacatgatccttcaggaaaaattctgagcctgtaaaccgtgagctgaaccgctgaacggccaaatctgacgtattttgctgcacaagcgggtgtaaaactgagactccggtgtgtgcggcagatgttttcttttctgcttttttcggccagtacggctcctttgcaaacgggtagaccggcacgctgatccgtttcggatgcttgtctttgtaaagcttgtgccaattaatggcgacacctttactccacatttcacagagcttcgttccttttcctttcgcaagccatttctcaatgagttcagcgctgtcatcatcatcagaaagccaggcaatatcttttgcctgctgtttttctcctctaaagcagcctgttacagccggcttatcattgataaaatcggcaagctgccgcttgagctccgcagtgccgcttgtgataaaggccgcgcgctcttccatcgcttcccttccgacttggaacgtgtaggcaagatcagcgaggccggcgtccgtttttctttccagaaaagccagcagctgttttgcgtactccttcagacgatctttttttctggcagacaacggaatgatgaacggaccggcagcgtctgctgcttcggatgcatccggatattgttcaaaaatcgcgtgtgtgtttgttccgccaagaccgaaagagcttaaagccatgcggtgcgctctgttctcacgggttaactctttcttttctcccgctacgtaaaacggagagtcttctaaatgaagattcgggttcggctctttgtaattgatgctcggcgcgatttcctgatgatataagctcatgacaaccttgatgcagcccgccattccggccgctgtatccaaatgcccgagatttgttttgactgaaccgatgccgcagtattgttttttatctgtatatcggccgtacaccgattgaagtgcggacagttcgatcgggtcgccgagttttgttcctgtgccgtgagcttcgacgtacgcgatcgtttcaggatggatgccggtctgatcaatgaccttctgaatgacctcagcctgtcctttgacgctcggcgcataaaatccgaccttatccgctccgtcgttattgacgccgattccgcgcagcagcgcataaatatggtcgccgtccttaacggcatccgacgcttttttcaagagcacggcgccggctccttcaccgccgatcattccatcagcagccgcgtcaaacgctttaatatgcccgtcgcttgaaaaattcagccccggctgatgaacatatccggcacttgattccgtatgaagggtcgcaccgccgacaagggcatacttggcttcgccggaatgcaggctttgaaaagccgaatgcaggccgattaacgaagatgagcagttggcatggacaaaatagctcggccctttcaacccgagtttatgagaaatcatcgtcggaatcgtgccgctttgggcaagcacccatgatacgtagccatccggcgtttccagctgtgctgtcgtctcctccggcagcaggctgcggtaagagttcgtgcttgcagacatatacacgcttgtttccggaatttcttttgagatatatcccgcatcctcgattgccttccatgaatggagcaaaagcattctcagctgagggtccatatattccgcatctttcggtgaaaagccgaagaaaccgggatcaaacatttctttcccctctaaaactgatttagccggaacgaagccgggatgatcagccagttcttcagaaacaccggatcggcggagctcctcttttgaaaagaagttgatgctttctttgccttctttgatgttattccaaaattcataatgatcttttgctcccggaaactcacaggatataccgataaccgcgacactgtcctcataataatcgggaatttctcccgctgggtgttcccggtcttctgtattcactttcttttgcggcacaggagccaaaacggtttctttcagtttttgttctgtgatgtaccggctgatgtcttttaccgtcgcgtattcaaacagctccgttacactgaattcacaatccagttcctgcgtcatccggtcagtgacagtcacggcaagaagcgaatctccccccgcatcaaaaaagcggtcatcaagctctatatctttgcttttcaatacatcctgccaaatcgccagcaccgcctgctggatatgagatgatgaaaatgtttgtgtgtccggctgcttttccgtcagatcgcgggcagcaagaagcttgcggtcaacttttccgttcggtgtgagcggcagctcttcaagacggataaacgaagctggcgtcatataggccggcagcgcttgtttcaaatgattgcgcaattcctttgcagacggaagcggctctccgtttttcaggatataaaatgcgcaaagtttttcatttccggagtgattgttcacaaccactacgctttcctgtacggccggataggcattcagccggctctcaatatctccgggttcaatccggtagccgcggattttgacttgggtgtccatccgtcccatgtattcaatgcggccgccgggaagaaaacgcgccatatcgcctgttttataaagctttgatcccaattcgagccggtggctgacgaaaacgttatctgtcagctcaggcttgttgaaataccctcttgccaatccgtctcccgcaatacaaagttctcccggcatcccttctaaaacagggttgagagcggaatccataatatacacacgggtattggcgatcgggcgcccgatcgtaagcgcgctctcattttccgttatacgctgcaccgcggaccagattgtcgtctctgtcggcccgaacatattccaagcctcacttttcgtatcgagaaactgctgcttcaattgttcgctaagcgcctctccgccgcaaaggattttcactttttcttcatttgaccatccggaatgaaagagcattttccacgtaaacggcgtcgcctgcatgatcgtcggtttgtactcttgaatcagctctttcagcttccgtgcgtcttttgtgaattctgtcttacagatgttgcactctgctcctttgattaaagggaggtaaagctccagtgccgcgatatcaaagcaatatgtcgtgacggcaagcagtttgtcttcggacgtaagccccggttcattcgccatcgagattaagaaattggtcagcgcccggtgcggaatcatcacgcccttcggtttgcccgtgctgcccgacgtgtaaatgacgtacgccagatcgtcaggtgtcactaaccgcttcagcgacgttctttccgcggctgtactttcaatacgagaccaatcgcggtcaatggcagttgtctgcacgcctccccagttcaaggagtgctctaaatcagctgtcgtcagacacattgaaatcctgctgtcggcgatcatatattccaatctgtcagcgggataagaaggatcaagcggcacatacgctcccccggcttttaaaatgccgagaaggccgacagccatatgcaatgaacggtctgtataaatgccgatgagatcatcagggcctgcaccgtgcgcctgcaaatagagcgccagcttcgtgcttttttcatcaagctcacggtacgtcagcttttgctgttcatacacgaccgcacaagcgtccggcgtttctgccgcctgacgttcgaataattcatggaagcaggcatccggatattcacggcttgtctcattccaagtcttaagaatcatgtgctcctctctttttgtcatgagagaaacgttctcaagcggcatatccggattcgccgtcaaagcttcagcggcctgtacaaattggctgaaaagtctggccgcccctgcttcgtcgaataattcggtgctgtatttaatcgtaagatccatgcctgatgcttcttcccacatttcaaatacaagatcatattccccctcctgatgaatgtcttttacaaactcacaggagaattccttgtattcatccagcatcgattgatagcttgaatactgcagaaagttctgatagaaaaaggcattgctgaaaacaggcgaaccgttctgcaggggtttcgcatgcacatcacgcaccattttcggaaacggataaaaggagtgatccagtccgtccagaacggcatcctgcaccttttgaacaaagtcagcaaatgtttcttttcgtccggctctgctccgtataggaagcatgttgaggaaatggccgaccactccgtcaaagcgttcttcaggtctgaccatcgcaggcatgcctgtcacaatatcttccttatctgtatatttgcttaaaagcaccatatagcagctcagcataacggtagacaaatgaatcgaacgggatgcggcaaacgccgttagattattcagcagccgttcgggaagacggcgtgtcagcgtatcttctgtaaactccggaacgctgctgcccgtgcgcatcggcggaagctgaaggtcaggcagatcgcccccgagctgtttcatccagtaagcgcgggcagctttgctttcttcacccgctaaataccgcttttcccaagccgcgaaatcggaatgaatgccgggagcggcggccgcaaactcttcttttccctccagcagcgcctgataatgatccagcagactgtgaataaatgtaatggatgaaaaaccgtcaaacacgatgtggtgaatgaccgtcaaaagataatgttccgaggcggattttgaaagcagccgcacgcgcagcaaaggcccgccttctttgacaaacggctctttaacttttttccgtatcagagcgggtatttgtgattcattgacgtcagaaatatcttcttccgagaatacaaaaggatctgccgcttctatgaaataaaacccgccgtctgtttcattcacggcgcttttgagcatcggatgctgctttaatacgagctgaaacgcctgtttcagtttctctttgtcgattccggttgtgaatcggaaacagagcgggacatggtatgcagtcgtttcaggcgacattttctgcaatgtccacagccctttttggacttctgaaagcgctggcgccgtttgccgtctctcccgttctgccggcggttcggctttttgggaatgatgctccgctgacatgtttgccgctttttcagcagtataagccgctaaagcgccaatcgtcgggtttttgtgcagctctcttgccgtcagccggatgtgatacgttttttcaattgatctggcgagtttcatcatcttgatggagttaacgccaaggctttgaaacggtgtatttggatcaacaagctcatccgcgatggaaagttcctctttcagaaaacggataaaatcccgttcaatttctttctctgcagaagccggggctgaattgccgccttcttgtctgttattatgtaatgaatcaaattgcccttgttcgaatgaatgtttcagctgagtgcgctggattttcccgattgccgtcttaggaatgtcttcttttgcgaccggaagcagataatcaggggtaacgccgattctctgtgtcacgtgctggtgaatgtgatgaataagcttcgtcatgcggttctcatccaatggaacagacgtcacaaagaaaatcgccagctcatctgtcgtgctttgattcggccggacggcgcatgccgctgtatatgacgtttcaatttccggcaattcctcaacggctgattcaatggcgtggctgtaataattcacaccgttgataatgatggcatctttcgtgcgccccgttatcgtcaggcggccttcacgcagaaatccgagatctcccgtttcaaaccagccgtcttctgtaaagacactctcgtttaagtccgggcgctcataatatccgctcgttacagtcagaccggacacttgaaagcggccgatttctccttcttccaccacttgattgcggtcatccgtaattctcatattaaaccccgggatcggcagaccgatctcgacgaaacgatcgtcgtcactcgtgttttccagtgtaaactcatctgagaaaattacgcccgaagacgtttcggacattccccatgcgggacggatggcattagccggcagaccgtgcggctctaaaagctccataattctgcgtccgactttcgccaccgcggcctccccgccgttcagcatataacgcatggaagataagtcccatttccgtgtttgaatctcttctgcgaaatcggcaagcagcccaaaggcaaaattgggggcccacgtgaccgaagcgcggtaatgatcaatcaggtcgagccattttaaaggatccatcaaaatggattcgctcggtatgttgatttcctcacatccgagataaacatcacgcagatgaagcattccgatgccgccgacatggtcaaaaggcatccagttaaacgtgacatcctcacttgtatagccctgcatctgaatatttcctttgaccatgcagacgatgttttcatggctgagcatcacggctttcggcgtgcccgtgcttcccgaggtcaaaagcagcatcgccaaatcttccggacggggatgatgacagtccgtatccatttcatgcgcactgagatcttctgccgccaaagcgcaaaacccggaaagctcctgctcctccgcccattcagtcatctccggcagcacttcacggcttgtgatgacatacggctgattcaaaagcgtccaggcgtctttcagtttttgcgtcccgctgttcatttctgtataagccggagcggccgcaagcggaaccgggatcgctcctaaaaaaacacagccccaaaacgcaggaatcagctgggaattgtcactgagctgtaatatgacttcatcctgagccttcactcctgattggcggagccctttcacaatcgaaagagcgatctttttcaggccgctgtaagtctggtacactttggtgccgtcaggctgtatatatgtgatgcccttttgatctcccgctgccgcggcggttttgtgcaggacttcaggaatcgtcatcggctgatccgctgaaagccgcaatggttttccgtagctgacagatggcttgagtaacccgcttgccttcatatcacttttcatagagctgcctccatttcatctgtatgtaagatgtatgtcttatactccgtacatcgtcgtgattcgttttttcacttcatcatcatgaaacgtctcatcgtgcatgattaactccttctcaatgacagccggaagctgctcgcgaaacggcgtcaccaagtgccttttcaatgtaattaaagagtttctcggtttttccgcaagctcacgggccaattcctgcgcatagtctaatacttcctgccgcggaagcaccggaaaaggcactcctcttttctccaggtcaccgccgcggtagtggccgccgtttaacagcatttcatggccgaggcttgccccaagcttctccggaacgataaaggtagcccccattccgggagtgaaaccgtatttcataaagtttgcggtatacacgctttctttgcttaaaatgacaaaatcactgaaaagccccatgacaaacccgcctccgattccgtggccctgcatggctgaaataacggggatatcacattccagcgccaaagaatacatgcggtcttccgtaaacttcgtgatgccctgctgaatcctgagcagaccttcctgtgtgcctccggaagcaaagtaatggccgtatcctgttaaaatcacagctttatagactgacgatttttttatacgggtgaatgcttccatcaatccatccgtcagttctttggagaaagcgtttttatgggctttatcctgcattgtcacttggataatatccggttcaatttcgagcagttcaactgcggcgttcggcatgatatcctcctaactgttctccgtttcccaaggaagccgccccgtttctgcataacggaaaatggctgattggttatccggatctgaaaacatcgcttgattttcggctagagcaatggatttcgaacgatgaacaaggtcgtttaaggaatccatgtattttttatagcggatgactgcttttttcgacagcgggcgaagacgcagcaaatgctttctcagctctgttgctgagtccgggacgcatacgtcacaaagtccccattcaagcgcctggcgtgccggcacgggctttgtcatgatcgtcatataatgagccttttgaaatccgattctttgaattaaaaacggcagaacgcaggctggataaagtccgaataacagttcagataaactgaacgaagcactctcctctgcaatgacgatatcgcaggcggcggcaaaaccgacacctcccgcatttacttttccgcggacgcgggcgattgtgatgtacggcccggattttaatgccagccacaaacggtaaagcggctcctgcgattccgcatgctgcattccctgcctcattttccggtacatctcatcaaaatccgccccgaaacaaaatacctccggctgcccttcaagcactacggaggtcacggagtcttcacattcagtaagaacgtgcaggcattcctccactaaacgctcattaatcgtattgttggcttcaggccgatcaaaggtgatgaagcagacattttgctgaaaacggacgttgatcgtctcataggtcacgggatccacctgtatttccgatgaaattccgtgatttcttccaaatataaacgagggctcccggcatgatggtctaaaatgttcggaatcatattcatatccaatttgacattccgggttccgaacttcaccagaccgctgcctttaaacagttcttcatactcttccatggacagcctgtatctgttgttcagatgctcttctattttgaaagaatgctgccgcgtttgtccttcaggcgtcacaacgccgctgtaaaattctgaacagcatccggagccgtacgagaaacagccgatccgcttagaagtgtcgaaagccccttgatcaatcgtgcttgcaagagccagtaaagaggctgcccccataatgtttccgactctttggcagtagcggagccccggctctaccctggtttgaaaatcctgttcgatctcagcgtttttcgcttttgcaagcttacgcatcatcgtccggtgagctcctttgaccatgccgccaaacggtgtatggaaggcaagatagtgaaacgtctctttatagtcagcgcccggcacacggtttttgtactcgcgaaatgtctgttcgcagcaatcgagataagacatcaatgacaagtcggcgtcaccggcttcactgtccgggatcggacggcatgtatccatcacctcatagccgtaatagccgttggcgcccgcatccgcctgaaatacgattgggttttcaccgatcaataaggcgacggcacccgctccggcgctcggttcggcgtaagaccaatcctcgcttaacgcatcgccgccttcggcaattaaaaaccgggaaatatccgtcgcgacgacaagcgccttcgctccgggggatgtctgcgacaaaataaaattaagcgccatctgcaaacccgccgttcctgaataacaggcctgcttcagttcaaataaacggcagttccggttgaggcctaaataatcatgaatatatgtactgagtgattttccgaagtcgatgccggactccgagcaggtaatcagcagctcgattctgtctttttcagcctctgtcaatcggtcgataatcggctttgccgcattaacgccgaatgtgacggggtcttcgtacggaagcgccaccgctttttctttcatcagtaaattctcaaatctggcagggtctaagtttctgtactccgccagctgcatgacatcaaggtatgccgtcccgccaaacacatttatcgcttctattccggcagccgccatgaacttcgcctccaatatgaattttgagtttccgattttttcaccgttttatcagacagcctgtaccttttcataaagctttgccgccaattcgccgatgtttgacactcccgtcagctcaacacgcgggatctgcagtgataattcttcaagcatcatcgtgataatttcggcgcggtccactgagtccgcccccagatcaactaaccggtcttcctttgaaagctgttcgccttctaaatcaggcaaaacctcgtagattgtgttctgcagcaattcaaagattctttcttcactcattgtcagttcctccctgtttcatcttttatgaatattccatgttttcaatctatcatttcgtcttgtcaacacgtttgcagaaatgagcctaacttctgattcaaaagcgaggccgtctcttccataagacgaaggccgataccatcggcatggcggtttttccaggactccagctccgtacctttcacccattgattaaaggcgcctaatgccgggccgcaatgaatctggaagtctaccttggcatccgggtctcctttaatcgccgaagcagagctttgcctgaaataccatttgaatatgagcgccattttctgtttcggattccgttcggcttttgaaatgtcttcattcgaataatgagccttcactttgtcataaatactgcttacacttgccttaaaatacttctcttctatttgtctgagtgtcttttcatcaatttcttcaattgagcggtgacgctgatacagttcatgcagcttagaggcccgggtcggaaagaacagccctttctttaatacctgcaccttgctgcctgattcaaacatatcgccggccggcgcgtaggccgtgtcctgtacattcatctgctgcaggagatcctttacgaggccgctcgtcgctgcttcaacggtgcattggttaatggatccggtcacaataaaatcagcgccgagcataaatgcggccatagcagcctcaggcgttccgattccccctgcggctccgatgcggacggttttgccgtatcggtattttttcatcatgtcatctcgtaaacggatgatcgccggcatgagactgtaagcaactccgccgtcagtgtggccgcctgaatcagcctctacgcagatgtcatgcgcaacgggtatttctctcatcagacttgcttcttcagcggtaattttgttttcggctgcaagtttctgcagaatgtgatcaggcgccgggctgagaaatgcttccgctacttccggacgggacagctttgcgataatccgctgacgcgctattatttgtccgccggcaccgcgttttaaccccttagcgcgaaaccttactaaagcaggagtaaccgttaaaaatgctgatgcttccaagttctgaaccccatgcttcagtaaaagatcaatcattttttcttctgaatctgtatgcttcatgttatgtacaacatttatgccaaaggaaccgccgtcacgaagctcatgctgaattgacaaaatggcgtcctcaacgtgcgcgatgttcaaaccgcccgttccgaaaaagcccatcattcctttttcggccagtttgacgaccatttccttcgaagaaattccgcggtacatgccgccggccaagtaggcgtatttcaattgataatcgcgcttaaactcttcatttcctaaagactccgccgtaattgagctttttccagcttcagccgggactttgatttcatctgttatcggctccgcttcagccgtaattctttgaatcagccccgtcagcacttttccgggaccgatttcctcaaagatcatgttctttcttcccattaaaaaacggatgctgtctgtccagttcaccgatcccgttatttgtccggtgagtgtctttttcagctcggtctgctcataaggtcttgccgtcacatttgaaatgaccggaatggacagcggcttaaaatggaaagtttcaataaaccgtgaaaattcctccttcgcttccagcatgtatctggaatgaaaggcgccgctgacatttaagcggtgaaccatttttacgccgtttacggcttcaaaaacggatgcggctttttcaatatcttctttatatccggaaatgacaatttgctgcggagtgttcatgttggcgatatcaatcgtatgcaagtgatactcccttaaaacgtccgtcacctgctcatgagtcaggccgatcaccgctgccatgccgcctccttttgcgcggctcatcaggtcgcccctttttttgaccagctgtaggccttcttcaaaatcaaaagcgcccgaggcgtataacgcgttatattcgcctaaactgtgtccggcggtaaaatccggtttcaagccggtttcttctgtttttttcaaataactgagggcattgacgacatagagcgccggctgagtgaattgagtctgattgagacgttctccgtcccggcacagctcctgaatggaatatccgagaatgtgatccgcctttgcggttaattcaggatagcggccgaacaggtcctctcccatccctattttttgcgagccttggcctggaaaaacaaagctgatcatcttacagtctccttccgggcggtgataaaatgctgtcttctatttgctgcaaatgggtttgttctttatgaaacggcgtcataatggcacggatgcgttcagccgatcctgcgggaagaatctgtttggcaaatgcggccaacgttccggaaggcccggcatcgatatacaatcctttttggcggctgtctgcgaattgaagcgcttcgcggaattgaatcggctttcttacaatatcccagaaaaagtccgcttgtatatcggtctcagcctctccggtcgcactggagatgtacggtataaacggagtccggattaatttctgagctaaaaagcgcttgtacggctgttccgcctgatcaaccagcgctgagtgaaacccgtaagataccggcaatagctgatgaggaatctgcttttctctcagatcgtccatgatctttttgatatgttcccgctctcccgagatgacaaagtgagaatgatagtttacagatgccaattcactatgttcgccgagcagcggatcatcttgatataaagccggatcacccagtatcgcaagcatgctgccgttacggcaagtttccgtaatgattcgggcctgttccagcacgcaatctaaagcatcctcagcgctcagcacacccgacacagcggccgctgcatactctccaaggcttgctccgatcacataatcgggacgtatgcctctttgctccaaagcatatgcaagtgcgtactcagccataaaaatggcaggatggctgaaaagaaggcggtcaaatggatcagacagacgattgcctgtatgataaacctctttcaggacagagtaaccgaaacggctgactgcaaaatcgtccaagtcaagcattttctgccgaaaagcggcgttatgtgcaaacagctctttccccatttgatagtattgggaaccctgtccagaaaacatgaaaacaattggctggttcatttgttctcctttttgctctttatttttttaaaatattgatttgtaagtttttcttgatgttgtgtgcaggtgaagtggtcgtgatgttgtatggctggcactattatgtgagataagaattttgacttgcgttccgctacatggcgggtgaagcttcagtttcttttttgatgcggtgaataagtcctgtcagcacatggcccgggccgacttcttcaaattccatccgccctttgtccagcagatagcgcatgctgtcgttccatcgcactgaatggtcgatctgatcggccagaacggagtggattccgtcttgctcataaggcctggcatgcacattagaaatgacaggaattgatatagcagaaaaatgaaatgactgtaaaaatttttcgaactcttgttttgcttcgctcatatatctcgagtgaaaagcgccgctgacgtttaacggatgaaacatcgtaacgtcctttattccttcgaatacgcttttggctctttcaatgtcttctttgcgtccggatatgacaacttggtgaggagaattcatattggcaatatcaatcgtatgtaatccgtgcgtttgaagggcgtccgacacttgagctgcggttaaccccataacggcggccatttttccgtcagtggccatactcattaattcgcctcttttacggacaagctgcaggccggtaataaaatcaaaagcacctgctgcaaacagcgcattatattctcccaaactgtggccggccaaataatccggctttatgtcattttcttggatttttttcaaatagcttaacgcgtttacaacatataaagcaggctgggtgaactgcgtcttgtgaagattggaatacggattctcaagacaaagccgtttcatggaatatccgagtgtttcatcagcctgctccgttaagtctttaaattcatcaaacaatgagcttcccattccctgcttttgagaaccttgtccggggaatatgtatgtgatcattttctcagccatcctttctcggattcagttaagaagcatgttcaagttgatagtaacttcacaaaaataccatgtcaagttaatttatcctatgcggaatcctgaataatgcctatttttccctgacggaaggcggactcagggcttttggaatagacataagcagaatgtcccattcagcctgcccggcgcttttatccgcaaactaccgttactcagccattcatcaccaaaaagcgagcaatgactatcatttcaattcagaagttccgtggcctaaaagaaaaactagttagatagaaccaaattatacgctacttaaagtgaaacagccctttttgattttttctgttgcggaaattcacgaaatgttcttttttttcaatctgaaagtaaatattgtttttcaaaagactctccattttttgacccggcttctccccgaaggagtgccccggatacacacgcacatgcggcggaatagaggctttgatcctctgtatactgtgaaacatatcttcagctgagctgcccctgtcctcacatataccgcacccttctgtaaacacggtatcaccggtaaaaaggtgatcagatagcaaatagcacattcccccggccgtatgtcccggggtcaatatacttctgatgataaaccctccggccgcaaaggtttgtccgtcttcaagcgctattaagtttctgcaccggaattgatagaaatcgatttccgccgacgacatgtatatatcagaatgatagatttgctgaagcggctccgccaagtttacatggtcataatgcgaatgtgttaataaaatagctgataaatcaacatccaattcatgcagtttatcggttattttatcgatttcccaggacgggtccaccgctatcgcagatttttttgagcggtctgcgataatataacaatagttggaccacatctggtgataagttttgatttgatgcacttcatatgtatgatccattgtcaccattcccatttaaaagatccgggcagactgctgccgccgcccagccgactgtaaccactttaccagatggcaccacgtttttccatggattttccggtaaagtttaaaaaactttctgctcccgccaaaagcaccagtctgggccttttttacaaattgctatgctgatatataaggaaatcagaatattaattcagatgaattctttagggaattttattcagaaaatgaaggatgaatatgagtttcggataaaaagaaaacaaattgaacttttgttttgagaagcaattacagaagcggccggaggagataatcagtttttagaaatgacccgcaattaagattattatttcaatccttttcttcagataaactaaaccacacgggctctcgaaatatatcagaataccttagttcttacaccgaattcaacgttatgttgacattaacataattgaactgagaaaagtacagcttaatttacactctttttttttgcgagaaaaccgttcaaaaaccagtctagctgcaacaattcacgaaagcgtcgcgcatgaaaaaagacgtcagttgaagacgatttatatttgattattgacaaggagctcagatgtttttgttagggctaaataaagttatctttttactgtgtaaaaagtaaatattaagatttagacaaatagactatgtgatatgggtcggagtttactgttcaaggtgatttgtcctgagctataaaagcactgagagcagctcgggacgcaatacctactaaagttaaagctgctatgggtggaatcggcggttttgaaataattcttaatatcattgacaattttactggtgcagttgaagatgcgtgctatgcggatgctctaaaagtaactggtaaccaggcagcaactttgtgggttactaaaactcttatgcttttcctttaaatggggctattgttggtgtttaacaaatttatcctgtgttaagctttaaagtgattattttctaaagtgtttaagatcggaggtaactatggaagataaaagtaatgctgaaccgagcccgaaagctataagaattctaacttacatcattcctataattttaatagggcttatccttgtccttaagaatattaacaccgccgcagcggaaatttcattttatattgttgctgtcggtgtggttctcttagtggttttcagtttgatcaaaaatagaaaataccgcaggaagaactaaatgtaagggggctaatcactagtcccccttgactgacttgcggatagtataacccgccaaattccaattttatttaaattcttccccatctcttccctgtgactttgtaaaagcaggtacccgcatacagagtattcatcttgtacttcagggatccttcccaaataactggatgttaaacaaattatcttcatgatttacggtataccatgcaacaattatgccagaactcaaaagttatctctgaaaggctgggtcattcaaactagtaaggctgcttgtgggtaaataacagtttagtctcacataaacgttgttattacatcacacgcttaaacatcttctccatttcatacgtactgtggtggataatgatcggccggccgtgcgggcatgtgaacgggtctgtcgttcggcgcaggtcgtccaagagcgctttgatttcgtcgtttctcaaatggcggttcgctttgattgagcctttgcagctcatcataatggccgcttcctccctgagttttttaatatcgatctgtttggcgtcaagcacctgctgaatgatttcttcaatcagttcagcttcttccccttttggaaaccaggccggatggcagcggacgatgtagctgttcgtgccgaatgcttctaaaaatactccgacgctttcaagctcatgctgatgctggtcaatgatcagcgcttcatttgccgcataatgaaaggtgagcggcacgatcatatcctgcacttcaggctcgacctgcccgactttctcccggaaatattcgtatttaatccgttcttgcgccgcatgctggtcaatgatatacaagccgttttcgttttgggctaaaatatacgtcccgtgcatttggccgatcggatacatcaccggaactctttcttcccgtatttcttcagagtcagcctcctcttcaggctccggaatatcggaaacaggcgcttccgttaccggcatgccgagctccggcggcactccgtgacctgcttcatccggcagggactcttcttctatgaccggctccggctcttttacgaccgaactcagcttcatcggtgagtaagacggctccggcgttttttcaggaagtttccgctcaggcgcgctttcctcgaatgtcataaattgctgttcgtttttggccggtgccggcgctgtttttttcgggagctgggcgctcggaataagccgctgcttttgaaacacttcctttatcccgtcacggatcagctcatgcagctccgtctctttgctgaggcggacttcaagcttcgacggatggacattgacatcgaccaaaatcgggtccatcgtaatttcgataaacgtaatcggatggcggccgatcggcagaagtgtgtgatagccctcatgcaccgcttttacaagcgggaaattcttaatgtatctgccgttaatgacagatgacatatagtttctggatgcacgcgtgatttctggaagcgcgatgtagcccttgacttcaaaatcaagcgagctgacatggagcggtatcatttttttcgcaaccgccgtcccgtaaattgcggccagcacatggcgcacgtccccgttaccgtttgtctgcaacagatttttcccctgatggcggagacggatggatacttccggatgcgcaagagcaatccggttgacaacatccgtaatattgccgagctccgtatgcacggttttcatatatttcaatctggcgggcgtattgaaaaacaggttggtaacgataatctccgttccttttctgctggaggatttctgttcagaaatgatattcccgccctgaagaatgagatgggttcccgccccctcgccgatgctcgttttgatttccagatgagaaacagacgcgatacttggcaaagcttctccgcggaaaccgagtgttctcacccggaacaggtcgttttcatctttgattttgctggtcgcgtggcggcggaaagcccgcttgcaatcatcggtttccatcccttcgccgttatcgagcacccgaatcgacgaaagccccgcttcctctatgtcgatttcaatgactgtgctgtttgcgtcgatggcgttttccaccaattctttaacgactgaggcaggccgttcgaccacctcgccggccgctattttattcgaaagttcatctgacagctggatgacttttgccaagtccgtcacctctttctattttaattttttttgcagcttgtacatttcattcatcgcctcaagcggcgtcatatcgagaatattgattgacttaaaagcttcaagcacttgtttttctttattagaaacagccggtgccttctgttctttttcaccgtcagcaaaaaaggacagctgtgccggttcttctttgacggcgggctttttctcaggtgccgccggaagctccggtttatctcccgtctgctcaagctgtttcaaaatctcctgcgcgcggctgatcagatcgtccgggagctccgcaagctgggcgacatgaatgccgtaacttttatctgcggctccttctttgatttgatggagaaacacgaccgttccgttatattcctctgcgcgcacatgaacgtttttcagctgaggaagcttatcttcaagcaccgtcagctcatgataatgcgtgctgaatagtgttttagcgccgatatgatcatgaacatattcaataatcgcctgtgccagcgccattccgtcgtacgttgatgtcccgcggccgatttcatcaaacaggatcaggctgtcttttgtggcgttcacaatcgcgtttttcgcttccagcatttccaccataaaggtgctttgtccggaaatcaaatcatccgccgccccgattctcgtgaagatttgatcaaaaatcggcagaaccgcttcttttgcgggcacaaaacagccgatttgggccatgatcgatagaagtgcgatctgtctcatgtacgtgcttttacctgacatattcggacccgtaataaggagcatttcccgcgaatcgcccatcaggcagttgttcggcacgtattcttgactgtccatcaccttttcaacgacggggtgtctcccttcaatgacttttacttcattatcagaaaagacgggctttgtgtaatgcctgttttcactgatcgtagcaaagcattgcagcgcatccagctcactcatttgtttggcaagacgctgcagacgcggaataaattgtttcaccttttcacgcagaccggcaaaaagctcatattccagctcgcagatgttgttttccgcttctaaaataagcgcttctttttccttcaattccggcgtaatgtaccgttcggcgtttgtgagggtctgcttccgctcataccgcccgtcctcaagcagatgaaggtttgcttttgtgacttcaatataatagccgaacactttattgaaaccgacctttaatgaacggatgcccgtataagcgcgttcctgctgctccagtctggcaatccagtctttaccgtttttgctggcgtcacggtactcatcgagcttctgatgatagccgtctttaattaagttgccttcttttaacgataacggcgggttttcatgaagggcttcttctaacaggtcaagcaaatctccgcacggatcaatcaagccggcgcgttcttttgcttttttatggttaagagatcctacaagctctttaatgctcggcacttgttttaaagattctttcagctggattaaatctcttgcgttgacgtttccgaatgcgacccggcccgccagacgttctaaatcgtatacttccttcaggcgctcgcgcagatcttcgcgctcaaacagatgattgatcagcgtctcgaccatttcctggcgttcttcgatttgggatgccctgatcagcgggcggtcaatccattgtttgagaagccggccgcccatcgctgttttcgtctcgtctaaaagccaaagcaatgacccttttttgcttttcgaacggatcgtttccgtcagctcaagattccgttttgaatacaggtcaattttcatcgcttcttccaattcatatacttgaaccggctgcagatgatccaggctccgtttttgcgttttctgcaaatacgtatataaacgcataaacgtctctgtcagctcttcgcccggcaagtgctttgcgatttcaatgcgttctgttatttccccgtcttcgatagaaatcgttgcgccgcaccgttctttcagctgagcagccgtatgttcgttaaacttgcttgatacgacaatttcctttgcgccgactgagtaaatttctgacatgacatcttcaatccgctcaataaatacggccaggttttctccggtcgttaagtctgataaagcgagaccgtatccgttacgaaattcggaaacggaagcgataaagttgttttccgactcatggatgccttttccatccatcacggttcccggggtgatcagctggacgacttctctttttacaacgcctttagccgccttcggatcttccgtctgctcacagatcgccactttatagccctttttaatcagctgttcaatataagccgccgcggaatgatacggcacgccgcacatcggaattttatcagccgaacctccgtctctgcttgtcagtgtaatttcaagctcttgcgacgctttttttgcatcttcaaaaaacatttcataaaagtcaccaagccgaaaaaataaaaaggcatcttggtgctctgcctttatcttcaagtattgctgtatcataggcgtgtaactagccatcatttaatccctcactatgtatcttctcttatccgaatcccattataacataaacaaaagagtgatatctttatatataaaaaagagactcggggtgttaaactcccctagcctcaacttattcttcaggatctccgactaaaaattcagggttaatgtcctctaattcttcgtcaagatcgtcttcccaatcatcatcatcgtcttcttcccagtcaggattgacttcgacgacgactttcgtttcaccgaccacttctgctaaaaattccctctctgcctgaaccacgattttatttccgttaggagaaatggtgacttcaagacaattcggctgctgcagcactttggcaatgacttcgtgttcgtcatctaagtaatttgtatctctgtatctgagtttaatcacatcgacatactttactctctcggttacaacttccgtttttgtattatcggcgtaagagtaccagacgtttatatcataatacccttcaatttctacagtcttcccgatcttttcggcatcgtacttgtggttgataatccagccgcccagtatacttgacggtttttctccaggcgagatcgtgttggtgcattgggtgaattttcttcctttcgcaactaccgctttcgtaataatttccctgtattcagacattccggcaggcctccttgttcttcttcgtgttatcttatgctgggcatttgtctcatgtgcatttttataataaaaatataaaaatacaaagtttctgtttcattgtatgcagccctgcccagaaactttacttttaagtatgataaaactttccagtaaaaataggacaaaacgttgagacaatgaaaatttagtacatattacaattagttcttaaacggcaaaaaaaacacgggccgatgaaggccccgtgtttaaatagaacagctgttattcgaatgttttacttttgaaccggtttctcccgtcagcaggttgcctccggtagatgtaatgatttcgtttgtcacctgatttgagatcgtatgtgcgacaagctgaagaaggtcattgacctcaatctgggaatctctgaattcctggatgatcggaatcccttcaagctcttcctgcagggcgtcaattttactttccacttgtttcagcgcttcaagcttttcgtagtgcttcaggttaacggcttgcttttgcagggttttaatctgattaataatcgcagagactttttcattttcgttaatctgcgcctcggcgcgtttgaaaaaatcaacttcttctgtttcagaaatcattttcgcaaggttcctagcctgctgtacaatgtctttctttgagtaaagcgtcatcattatttcacctcgattgcttctcctgccatcacaccgtcaagcgaccatgttttcgcctgttcgattttgacgcgtacaatcttgccgatggcgtctttcggccctttgaagttgacgagcttgcttttttccgtatagccggcaagaatgtcagggttatttttgctttctccctcaactaatacttcgacagtcctgccttcatattccttcatttttttggctgaaatttctttcaccaaatcattaaggcgctgaagacgttctttcttgaccctcatcggaacattgtctttcatcttcgctgccggcgtgccttcacgaggagagtaaataaacgtatatgcgctgtcaaattccacttcgcgatataacgaaagcgtttcttcaaattgttcatccgtttcattcggaaaaccgacaataatatcggtcgtcagtgaagcgttcggcatcgccgctttaatttttccgacaagctccagatagcgttctctgtcatatttacgggccatcatttttaacatcgctgagcttcctgattgaaccggaagatggatatggtctaaaaggttgccgcctttggcgagcacttcgatcagatgatcatcaaagtcacgcggatgactcgtcgtgaatcggattctcggaatatcaattttacgcagttcgtccattaaatcaccgagaccgtacgtcatatcctcaaaatcttttccgtacgcattcacgttttgaccgagcagcgtgatttctttatagccttcgcttgcaagtcttctgacttcctggataatttcctcaggacggcggcttcgttcttttccgcgggtatacggtacgatgcagtatgtgcagaacttgtcgcagccgtacataatgttgacccagcctttaatttttccgttgcggactttcggaaggttctcaatgacatccccttctttcgaccacacttcaatgaccatctcttttgataaatatgcctctgataacagttccggcagacggtgaatgttgtgcgtgccgaaaatcatatcgacaaacgggtgcttcttaaggatgcggtttacgactgattcttcctgtgacatgcagccgcagacgccgagaatcaagtccgggttattttttttgagcgcctttaaatggccgagctctccgaacactttgttttcagcgttttcccggatggcgcaagtgtttaataaaataacgttcgcgtcatcaaccgaatttgtcgcttcataaccgagcgccataaaaatacccgccatgacttccgtatcatgctcgttcatttggcatccgtacgtgcggatataaaatttcctgccttcaccaaggcctttaaattcttcagagattttaaaatcgttatgatattgaacggattctttgccccgttttttcgcatcttttaaagaaggcggaatatatacggcttcaaaatacttgctgtaatccttttcggattttttgtccgccggattcacttgtccgctttcctgcttttgcttttcattcatgttcgaatgtctcctttcaaccgaaacttccaccctcaagtatactggttaaaagcgtttggcacaaccgccagcctattattgtacaccttattgagaataagaatcaataagaaataaaaaagagggaatcatttcccccttacacaagctgaagctcttttgcggctgaacggattacttccagggcccggtcaagctcctcttttgtatgctccgccgtaataatggtgcggattctcgcttttccttgggcgaccgtcggatacacgatgctttgtgcaaacacgccgcgggtcaataaaaggtctgataatgcctgggctttttcttcctcccctattaatatcggcacgatcggtgtttcgctttttgtgagggtcagccccatttgaaccagtttgtctttgaaatacgccgtgttctcccatagcttttccatatgctcaggctcttccagcaggacgtcaatggcttctatgcatgcggccgttactgcaggcggatgagaagtgctgaataagaaaggacgccctttatggcgcaggtaatcgatcagaacctgcgaccctgcggcgtaaccgccaagcactccgatggctttgcttaatgtgcccacctgtatgtggactcttccgtcaagcccgaagtgattaaccgtcccccttccgttttttccgagtacgccggaagcatgcgcatcgtcgaccatcacaaaggcatcgtacgcctctgcaagtttgacgatgtcaggcaaaggagcgatgttgccgtccattgagaatacgccgtcggtgacgatcaggcgcatgcggtaattcattgattttttcagcaccctttccaaatcgtccatatcaacatggcggtacacctttttatctgcttttgtcagcctgatcccgtcaataatggaagcatggttcagttcgtcagagatcacgatatcttcttttgtaagaatgcttgataagacgccctgattcgttgtgaaccccgattgaaaaacaagtgccgcttctgtttttttaaaggttgccaattttttctccagctcattgtgcattgtgaatgttccggcgattgtacggacggaccccgtacccgctccgaattcttccgcggcgcgtttggccgcttcgacaagtcttggatgcgacgtcaaaccgagataattgttcgatgaaagctgtatcacgttttcccctttgacttccaccgacggaccctgcttcgtttcaatttgtttcatttgctgccacgttttattttctttcattttatcaagctctgcttttagaaattcaaattctttcattatagaaccctccccttatggaatcaaaatgactttgccgcactgtccctttctcatcaggtcaaaccctttttcaaagtcttcaagcggaaactgatgcgtgatcaccggcgtcagatcaacaaggccggattcaagcaggtgcgatacctgccgccatgtttcaaacatttttctgcctgtgatgccttggacggtaagtcctttaaacaccacgtcatttgtcaggtcaaccgtcaccggacgttccggcagactcagcatgtggaaccttcccccgttggccgccatctttaatccttgtgttatggctgccgggtggcctgacatttcgcagacaaggtcgatcccttcaccgcctgttaaggtgtcgatcacctcaagcggatcttcctcatcaactgaaatggtgatcgcagctcccaatttcttcgcaagagccagcctgtaatcatttttatcaatggccgcaatacgggatgcaccggccgctttagccaccgccaccgccatcagcccgatcggtccgcagccgataattgcagcggaaccgcccgcaagccggctgctttccagcaccgtatgcaccgcgttgccaagcggctcttgaacagaggcgacggcggggtccatatcagcggggtttttccaaacatttcgggccggcactttgacatattcagcgaaggagccggctgtatctacgccgaggatctttgtatgggtgcacacatgatgtttttctgttaaacacgggacacaagtaccgcagacgaagtgggtttcagccgaaacgtagtcacctattttgacatttgtgacgtgcttgcccgtttccgctacgataccgctgaattcatgtccgaatacttgaggtgttttgattcgtttctgcgcccattgatcccaattataaatatgcacatctgtaccgcatatagatgcggcctgtactttaatgagaacttcattctcattaatggaaggtatgggaatttctttcagcgttgctccgaaagcgttttcatttttaacgatagctttcatctttcctcccaacatgtacactcctcctcgaaaaaacactgtaataactggattgtaacatgagataaaaaggaggtaaacaccagtgtccactcgaggaaaacaactgcttccgtccggaaaaatgggcgggattttttttgaatattatatgaataaagccatttatcatctcttcgtactatcaatataatattgtgagaaaatatgacagcaataaaaacaacctgctcgccttacgcaagcaggttgagaatgtacatatttttgtttttaacggggttcgacgattaacttaatcgccgttctttcttctccgtcaatctgtatatctgtaaaagccggaatacaaatcaaatctacgccgcttggcgcgacaaagcctctggcaatcgcaaccgctttaacagcctggtttaaggcacccgccccaattgcttgaatttcggcggctccgcgttctctcaatacgccggcaagcgcgcctgctactgaatttggacttgattttgctgaaacttttaagatttccatttctgctcccccttagttttacaatggataagtgagtgttcattagaacaatcattattagatgttgctatccaaaaagccatccccacaatgcttttcaaaaatagcgggctaccttccatttctactatattcactaagaagttgctatattcctgcttttccttttaatatttttataaaataaacacatgatcacctattcaaagaacatatggtcatcattgattaatatccgttcgatatttacggcctttttcgtttgatcgtcgatgtcaatgagcactccgctcagcgtagttttaccttccgccaccgtaaaccggacgggaagattggttttaaaccgcttgatgaccgtttctctgtccataccgagaattccgtcgtacggacccgtcatgcctacatcagtaatatatgccgttcctttcggcaaaatgcggttatctgccgtttgcacgtgtgtatgggtgcctaccacggcagaggctcttccgtctgtataccagccgatcgcaattttttcgcttgtcgcttccgcgtgaaaatcaataaaaatgtacggtgtgcgctttttcgcttcttctattaattcatccgctttagcaaacggatcatcaagcggcggaagaaacgtccgcccctgtaaattaatgacggcaagctcttttccgttcgatttaatataagtaatgcctttgcccggcgtaccttccgggaaattcgccggccggacaagatgcggcacatcatcaataaagtcgaagatctctcttttatcccacgtatggtttcccattgtaatggcgtcggctcccgcttccatcaggctgtggtagatcttttccgtcagtccttttccgtgtgctgcattttctccgttaataattgtaaaatgcggtttatgtttcgctttcagtttcgggacatattcttttaccatgtcgcggcccggggaaccgacaacatctccgataaataaaattctcatacattccattccttccttttcagggactcaaaaaaataaagtgatgcgctaagcatcactttattttgcatactctacggctcgagtttctctgatcacggtcactttaatgtgtcccggataatcaagctcgtcctcaattcgtttacggatatcacgcgccaaacgatgggcttctaaatcattaatggagtccggcttcaccatgatgcgaacttcacggccggcctgaatcgcaaatgatttttcaacaccttcgtaagactcggagatttcttcaagcttttcaagtctgcggatatagttttcgagcgtttcacttctcgcgcccggtcttgcggctgacagtgcatcagcggcagcaaccagaacggcgataatggaagtcggctcttcgtctccgtggtgtgacgcaatactgttaatgacgactggatgctctttatatttggtcgcaagctccactccgatttccacgtggcttccttccacttcatggtcaattgcttttccgatgtcatgcagaagaccggcacgcttggcaagctttgcatcttctccaagctcggaagccattaaaccggctaaaaacgcaacttccatagaatgtttcagtacgttctgcccgtagcttgtacggaatttcaaccggccgaggatcttgatcagatccgggtgaagtccgtgaacgccgacttcaaacgtcgtctgctcacccatttcccggatatagtcatcaacctcacggcgggatttttcaaccatttcttcaatgcgcgccggatgaatacggccatcctgaacgagtttatcaagagcgattcttgccgtctcccgtctgatcggatcaaatccggaaagaatgactgcttcaggtgtgtcatcaataatcaggtcaatacctgtaagcgtttcaagcgtacgaatgttacgcccttcacggccgatgatacgtcctttcatctcatcattcggaagattgacgaccgataccgtcgtttcggcaacatgatctgctgcacagcgctgcaaagcaagcgacagaatgtttttcgcctttttatctgcctcttctttcgcacggttttcggtttcttttgtcatgatggcgatgtcatgtgaaagctcattttcaacccggtcaagaatgatttgtttcgcttcatcccgtgtcaggctcgaaatgcgttcgagttctgactgctgcatacgaatcatctcatccactttgctttccatctcttcaatatgttgttgtcgttcattcagagaatgatctttcttctccaacatcgcttcccgtttatcaattccttcatgtttacggtcaagattttcttctttttgaagtaaacggttttcttgtttttgaagctcatttcgtctttcacgaacttcctgttcagcatctattcgaagtgtatggatttcgtcctttgcttcaagcagagcttcttttttcagtgcttcagcatcacgctttgcatcttcaaggatttgctcggcagcaccgcgtgcgcccgcaatctttgcttcggcaatggttttacgaacatagtagccaacaactaaaccgagcagagtcagcaaaatggagatgagaaccgtcattggggtcatactttcacctcctcttgctatgaacttggtttttgcttaaataagtgccggcatgtacattgtctgattttctcaacatacagaaccttcacagggaatgagtctctcatgcccttgtcaagtttaaatggtttaacaatcatgttaaaaaaacaaatgttacaacttcattgtaattgtgtcggaaatacttgtcaagcttgccagcttaacgattcgccttcagctcggatcgccgcccatgtatatatcataccataccttcatccgcttttcgtgaatgacggctctgtcagtccgcctggttaagcaattggtaaattctattgtttacctgtcctaatttggcgttattctgaatgtttgacagtaatatgacatatttgcttgccgaatggctgaaactgtttaaaatgttgtaaccgggcataacaccgtgattggaatagctgcccggatcaatgtaaaaccccatcccgtaagcggcactgcttcctgctgtaaacatttttgtgaagctttcttttgaaaggagcgtgccgtttacgatcgctttatcaaatttataaagatcttcagcgctcatatacatgtcgcccgccccgtaaagctgcgataagtccaaaaggtgcggcgttacaagactgccgctctcatcgactttgtagccgacggcaggatatttggcttcagcaaatgttttgtaaaatccggcatgcttcattccggccggtttgaacacgtgttcttttatatattgttcataagactccccgctgacctgagatgcgatataagcaagcactgaatagttggaatccctgtaatcccaaaccccgggctgccttttaattccgcggtattctatatccttgattaaatcaattggagaaatcggtccccgaccctcaatatgcccgtttatgccggacgtatgattgagcaggtttttcaatgtgatgcgcgtgccgttaggaaaattcggcaagtatgtactgacggggtcactcgtctgcagcagccctttttcttcaagctgcaggacagccgtcgcgattaacgctttttgtgaagaaccgatataatatgatgtctccggattgtttttaattttttgttttcggtctgcatagccaaagccttttttcagcacaacttttccatcttttacgatcattgctgtgccgctgaacccgatctgttgcaagtaattgctgatctgtttattgtgatcgattgatttaggtgttttctctttttgcgtcttttcttttttctgttgagtctggtcttttgaagtatcagattgagcggcgggagcgtttttaacggattccttctcccgatgatgcgctgtgacggtccagatcataataaaaacagtgacaagcagcagaaaaagaaacagccctcccgttttcatcagcttcttctttctttttttatttattcttgtgcggcgggggctcgtcatcttttttcctcctcagatataatttcaactttcgccatgatgttagacgagtgaagggtgaaaaaagttgtaacattccagataaaattttccgaaacagccagtgtttttttgaaacatacaaaaaaaagagcggaaattgcttattccgctcttttgatcgtgtttttattcttctaattccatctcttcctgaacttcttccgctttgtccgttacaccgttattgtctaaaccgtaatattcacggatttgttcctgaatcatcagcatgatgtctttattttcttttaagaactgcttggcgttttcacggccctgaccgaggcgttcttcttcataagaataccacgaaccgcttttttgcacgatatccagttcagttccaaggtcgatgatttccccttctttggagattccttcaccgtacataatgtccacttcagccgtacggaacggaggagcgactttgttttttacgactttaattctcgttttattccccatcacgtcgttgccctgctttaattgctcggcacggcgcacttcaagacgcacggaagaatagaatttcagcgcgcggccgcccggtgtcgtctccggatttccgaacataacgccgactttttcacgaatctggttaataaagattgcgattgttttagatttattgatggcgccggaaagcttacggagcgcctgagacataagacgcgcctgtaaaccgacgtgtgaatcacccatgtcaccttcaatttcagcttttggaacaagcgccgcaacagagtcaacgactacgatatcaacagctccgcttcgcaccagcgcttcagcaatctcaagcgcctgctcccccgtatccggctgagaaagcagaagctcttcgatattgacaccgagcttttgcgcgtaaacaggatcaagagcatgctcagcatcaataaatgctgcctgtccgcctttttcctgaacctcagcgattgcgtgaagcgctacagtcgttttacctgaactttcaggtccgtatacttcaataatccgtccgcgcgggtatccgcctattccgagagcagtatcaagtgcaagggagccgcttggcaccgttgaaattcttgtatccgttttttctccgagcttcatgatggaacctttgccgaattgtttttctatttgcttaagagccatatctaaggctgcctgacgatcactcatttattttttcctcctttatcttgccactacatatactataccttgtttactggcatttgccaagaaaaaagcgaacgcatattcggattttttccgcgttcgcttttctgcaaaagagcataatttcccttatgaaacttaaaaatcagagaaaaaagctctttaaaactttatttttgatccagcatttttaaaatgagatggcagccgtatttagcggcgcgctttctgattccggttcttgagccggcaaagtgaaattcgtgcacctcttcttttccttccgctgaaatgccgataaagacgcggcccggcgcatgcccttcctgcgggtcgggacccgcgaccccggtaaagctgatgccgatatcgcttccggtcagctttctcacaccggatgcaagctctttcgcacactctttgctgaccgctccgctttctgcgagcgtctcagctttcacgccgagcacatgctgtttcacgctgtcggaatagcagacaacacctcctgcaaatagttgagacgcaccgcttaaatcagtcacccactctgaaaacaagccgcctgtaaagctttcggcagaagaaatcgtgattttgttttgtctgcatgcttttgaaagctccttcaccagggacgtatcatcatatccgtagaaaaattcaccgacacgttctaaaatggcggcttccgtttcttttaaaagccgttctgtttctttttcgtcagcatgtttcgccgttaaacgcagcgtgacctcgccgtcagcagcaagcggcgcaatcgtcggattcgtctgcgcgtcaatgatatcttctaaatcagcttcaagctgggattcaccgattccgaaaaaccgcagcacggttgaaacgattttctcattagaaccaagctttttaagaagcagcggtttcgcttcattttcaaacatcggacgcagctcgctcggcggcccgggaagcagcatataaagccttgagccgtgctctgcaagcattcccggcgccatgccgaaatgattcgccaaaacgtccgagccctcaatgacgagcgcctgtttgcggttattcggcgacatggtccgttttgttttcgcgaaatattcttcgatcgaccggaacgcttcgtcattcagaacgagcgggcgccccagtgtgtttgcaatggtttctttcgtcaaatcgtccttggtcggtccgaggccgcctgaaaaaataatcaggtctgagcgctcttcggcaatgcggatgacttgcttaagccgctccggattgtcaccgacagcggtatggtaaaacacgtttacaccgatttccgccagttctttactgataaactgcgcgttcgtattggcgatctggccgagcagaagctccgagccgaccgcaatgatttctgctttttttgctatttccatctttaagtccttcttccttagttagatgtttttaacgcatcccagttcttcgcaaaataatcccagccggaaatgactgtgaagagcacggccacccataaagcgatatcgccgaacgggaaagaaacgagctcaaacggaagattatgcagcaaaagcgcggcaacagcgatgatctgggcccatgttttaattttccccagcatattggcggctacaacttcccccgttcccgccagcacaagtcttaatcccgttacggcaaattcgcggctgatgatgatgatgaccatccacgccggcgcaaggtcaaattgcacaagcgtaattaatgccgcggacaccagcagtttgtcagccagcggatctaaaaatttcccgaagtttgtcacgaggttcagttttctggcgtagtagccatccacccagtcagtcgttgatgcgataatgaacaaaacagctcccgtaagatgcgcgaccggaatcgattcatcccctatatgaacgctgccccaatgaaaaggaacaagcatgataatcataaatacaggaattaaagcgattcttgccagtgtgattttattcggtaagttaaacataaagcccctccaataatatgtactcggacgtgaagaaaaagtcatcttaatcgttcagatgactttttccccttttattttttcatcttgattgtgatggtctgcgccatcatatcatgcggattgagttcataggacagaacctctccgttgattttaattttcaggttaggggcatagcccgtgcggatttcaatctgcttttgatccgtgacgtcttttttaaaggtttcgcctttttgcagcgttccttcttttaaagaaccgccgctgtcatcacggacgcggatccatgcgctgtcagaagcaatcagttcaagcttatacttatctgccccggagacgttgtatgaagaagccgagccttccgttccggccgctttgatctccgtcttttcactgcttttttctttctttttctgctctgacgcttttgtgtcttttttgctgtcagattgcgcttcgtcgtttgtattgccgtcgtttttcagcgcagaatccttaggaatctcatacttgctctcactttgggtgacggccttatctccgtctgtctgcccggatttgctcattccgaactgaataatcgcataaatgatcgcgatgacgataatgacaccgatgacgacaaggacggtcggaagccattccgccgcctttgaagcggacttaggaagctccctttgcatggcgagaccggagattttttccgacacatcgtcatggtacgtgttagggatgtcttttttatattcttcgaataactgatctgaatcaagcccgacagcttcagcgtactgcttgataaacgcccgcacataaaaattgccgggaatgacgtcataattgccttcttccagagcggttaagtatcttttctgaattttcgtcgccgcctggagttcatccaatgacatccctttttcctctctggcttctttaagccggattgctaattctgtcacaacaaacaccttccaatattaaaaatcaaagcttgaaaaaccggtctggtcaaacatttgcggttcttctgcatgttcatatgtaatgacttcgtcaggatcatttctgagttcgataatataatcgaaatcatcgagcgtatactccgaattttgaacaaaaatatcggggtgctccacgacctttgtcgccggaagccgcataatttcactgacgagctgaagatggcgctcagatccccgtcttgtcgaaacgatgccgtcgaggataaacacgttttccgtgctgtattcatcggcaaccagctggctccggatcgtttgttttagcagcgttgatgatacgaaaagccatcttttgctggcacaaacgcttgacgcaacgatggactccgtctttccgaccctcggcattccccggattccgatcagtttgtgcccttcttttttaaacagctcggccataaagtcaaccagaagaccgagctcgtccctttcaaaacggaaggtttttttgtcatcggcatcacgctgaatgtatcttccgtggcggactgcgagacggtcgcgaagcctcggttctctcaacttcgttactttaatggtctccattgtttttaaaattgattccaatcgtttaatttgatctatatgccggcatctgagcagcattccccttctggaaaggtcgacaccgttaattgtgacaatattaattgacagcatcccgagaagagatgaaatatccccgagcaggccggggcggttcacttgaatttcatattcaaaataccattcgagctttgccaaatgatataccccctccattgtggcaaatttttaccttcctttatcataaaacatttttctctaattagaaagaagaatgttgctctatagaggaaaacataaaaaaagagaggagaaatccccctcttaatgagtgctgttattttcaacaagcttcaccatcatatttgcgatggcgcgctgttcatcttcagaagcaacgctccaaagatcagcaagcactttttcctgatggtttttcgagtcgacttcgttcgcaaggtaaccgccgatttctgtcgcgaggtcagtgatcgtttcatcactcatccctttttcctgcgcatagttcaatctgtcgccaaggaaattcttccaattatcccagttttctaatactgacatgttgggttcctccatttcatctgttgttacaaaattattttgtccgtgcagatgcaaactatacacacatttttttcagcagtgccagccgccgtttacggataatatatgccccgtaatataggaagccttgtccgataataaaaaggccgccgcttcggcgatttcctccggcttcgccagccggcccgcgggaatttcctctgccaacgcttctttttcatcagacgtgaactgatcaagcatatttgtatcaacggcacccggcgagaccgcattcacgcggacgccgctcggagcgagctctttggcaagcgctttgacgaacgaatgctgcgctcctttgaccatgctgtataatacctcgcacgatgcacctgtttctccccagacggaaccgatcgcgacaatgcccccgctttttttccggatcatgccgggcaccagattacgcgccaaaagaaacggactcgtcacatgcagctgcaccatctcccgcgccgtgtcatccgtaacgtccgtaatcaggccgaaatgacttttgccgctgtttaatatcagagcgtccacaggctgcttaacggaacggctgagtgtctccgcgccatccggtgaggacagatcagcctggatagcggaggcttttacgccgaatgatgcgctcagcctttccgcaagcctgtgtgcggcttccttattagaatgataatgcaaaaggacgtcatatccgttttttgcgaggacttcacttatactttgtccgattccgccgcttgctccggttacgagcgctgtctgtttcatcaatcaatactccttctttccccagaaaaacatccctcagggcgtgagggatgttttgttatgattttggcacgactttgcagactgtcagcctgtcttctgatatttcttctttaatgacccgctttacgtcttccagggtgatctgctccagtacggttacgacatcaaacagactcatatctaaaaaggcgtagcgtgtgaattggttggcgatgtattcaggcgaattgagcgcttttaaaaatgacccgatcttcttttttctcgcaaggtcaagtttttccgcagttacggctgattctgcatcaagcagcatctgttttaattcgtcagcgagcttatccggctctggtgtatctcctccgacagaggcaaagccgaatccgtattcagccgtgtaatcaaagctgaaggtttcatcaatgtagcctttatcgtacaagttgccgtaatgcggtgagctttttccgaagagacattcaagcatgaggttcatgctgagctcgtgcttcaacagctcccgccccgttttataagggtctttcgcctttaaaccgacaagacattttgagccttgcacgttcatttttaattcctgctcccggcggaaaaccgcttcctgctcctgaacctctttacgtttgatttcaggctggtctgtaaacggctttttctcctggtttttccgcacctggctgatgatcgcttcaggatctgcggggccgacgataaagagcagcatattgctcggatgataaaacgtttcgtagcactcatacagcagatctttcgtaatatgagagatgctctccaccgttccggcaatgtcaatttttacggggtggtctttatacatattttcgataaggccgaaaaacagccgccaatccggattatcatcatacatattgatttcctggccgatgatgcctttttctttttcaactgatttttccgtgaaatacgggtcctgaacaaaatcaacgagtgtttccaggtttttctctacattagaagtgctggagaacagataagcggttcgtgtaaatgatgtaaaggcatttgccgacgccccctgcttactgaagtcctgaaacacgtcgccgtccgctttttcaaacagtttatgttccagaaaatgcgcgattccgtcaggcacgtgtaccatttcttccttatttaaaggaacgaattgattgtcaatggaaccgtactttgtcgtaaacacggcgtatgttttattaaaaccctgtttcggcagcacatagacatcaaggccgtttgccattttttcatgatacagcgtttcctgaagctgttcgaaatttatcggtttagtcaagatgctccccccgtcccttttaagaaataagtcgtatccagcttaatgttctttccgacattgataatgtcctcttttgtcactttctcgatattgtcgaggaaagtttcgatcggtatttccacttgggctgaagcctgctgatacagaaattccgctaagccgtatgccgtatcaatcgtttctaacacttggtttttaataacggctttcgtttgggcgatatcgtcctctgaaaagtcaccgttttgcatagcctgaaattgttcttcgataatggtgacggcctgcttataatttttcacctcaatgcccgacatgaccatcaaaagccctttgaagctttccacccttgaggctgcataataggcgaggcttgctttttcacggacatttataaacagctttgaatgagagaaacccccgaacagcccgttaaacacctgcaatgccggataatccggatctgtatatgtcgtattggtccggaatccgatattcagcttgccctgcttgacgtcctcttcatcaatgacttccttcggatcgggctgttcattcgtcttgcttctttcaaaaggctgcagctcccgttcttccgttttaaaatacgtatcaacggccgttttcacctgatctgaatcaacatcgccgatgacgtacaggtccagctgatcttcgcgtatggctttttgataggcttcatacaactcttgcggtgtaatgtgttcgacatcatcgaactcgccgttgacgtgaagggcatacggttcgcttttgcacatttcctgaacgagacgcagattagaatatctcatcttatcatcatatacggcttgaatccgctgtttcagcgtccgtttttcctgcgtgacataaaggggcaggaaggcgccgttttccaaagcgggcgaaaagacaagctctgataaaagctgaaggcctttttccaataacggtgtgcggtccttcagatacttttcgttaggaatctcaagtctgaacgtaatgacatgacgttctcccttttttgtcagatcagctgaaacggatgtgccgtacagctcatcaaaataagaacgcagatcagcggttttcgggcggctttctgttccgcgcagaagcacatgcggaaacagcgccctttttgttacgagctctttcgttaaaggagccagcattttaaacgtcagcgaaacggttttaaatttctcagtctttacgatgtgggcggtgatcccgccgtgctttgacttcatttcatttacgtaagtcatgtgaaacctccttcgttcattctttaatagtatgtattatggccaaatttcaggattcgcaaaaaagagtgcgcagatgtaattatatcaactggaggatttataaggaaacaaaaaacctctgcccgaaaacaggcagaggcattgaacgttattttttcaaattgaaaggccaccagttggctcttccgaatattttcaccatgaccggcacaaaaaacggaaggacgacaattgcgtacatgagaaggcctgttaataccacggttgcaatctgtaataaggaaagaacgcctgacggcagcatggccgcaaaggttcccgctaaaataatcgccgcagaaatgatgacggaacccatatttttcatactgctgatcattgcgggttccgttccttcttttttcagctcattaaagcggtccattaaaaagatggaataatccacaccaagagccatcaaaatgacaaagccgaagaacggcacggcccagtttacgcccggatacccgaagaagtgtgtaaagatgtattccgtcacgccgatggatgcgaaatacgtcagtacgagcgacgccactaaataaacaggcataataagagagcgcagcattatgatgagaatcagaaaaattcccgccagcataaacattgccgtccgtttgaagtctgaatccgatacttctttcagatcggcattcatgctggagactcccgaaacgccgaaagaggcattcttcagatccgtgttcggaatggctctttttacgctcgctttgatcgcttgaatatcttgaatggccgtatttgagtaaggattgttatcaagaacgacggtcaattctgtcgtttttctgtcatctgacatgtacgtattaaacacgcttgtgaaatcactgtttgtcaacgcgtctttcggcacaaaccagcctgtcatttctttatctgaggccttgtgaagctcacccaggtaatcattcgcccccatcatgccgcttgatactttcttaagcccttttacactatcgttaaggcctgaagaaagatcgctgagccgggaagaaaaatcaccgagaccgctcttcatttttttctggccctccgcgagctgtcctgccgccgattcaaggcgcggcatttgtcctgcaagagccccctgtccgtctgacacttgctgcagaccgttttcaatactggtcagaccggtgatcattgcgttaatttgagtgtcgatctttttttgagcggctgccagccgggcaaattgtttttccgcttgctgcagatgatccttttgactgtcgacctgtttagaaaacgcttctgcatccgcgtttgccttggaaacggctgactgtacacccgtaaaggccgatttgatttctttgtaagagggatcggttttgactgacggtattgacgcttccaattttgcaaacggcagccgggcaagctgcttgttcaaatcggcaagctgtctgctggtttcatctttcatcggcaggacggtttttaccaattttaaagcgttttgcgtttctgaagcgagaccgctgttttgtttgagctgtgaagtcagcatttgtttttgctcttcaatctgctttctcatctgggcgacgccggctttattctcattcacgcctgcctgcagtttattcaggttttcgcctatatcagaaagcccggatttcagagacaatgttccgttaataagctgattgacgcttttccccgactcttcgatctgcggctgtgaatcagctaacgactttgcggcatgccctaatccgtccgtgattttttcaagtcctgtattgcctttatcaagcccttcttgaagctgctttgcctgatttgtgacaaataattgattcaatccgtttccggcagggcgcgtggcgcttctgaccgtttttacaccctctgttttttcaagttctctgctgattttttcgatatcaatcaggtgtttttcggtatttagaggctcatcatttttgatgacgactgtggccggaagaagctcccccgggccgaatgcgtctgaaatcgtattaaacgcgcggacggattcatatttatccccgatttcgtcaaggctgttgtaagatagcgatcctttgtaaagaaggatcggcgggacggtgaataccgcaacgattgcaagactgatgagcggccttttaaatgaaaaccgccctgccgtttcccatgctttactttgaggatgggaaatatcacccttaacgggccaaaacagtctttttcctaaaacagccataaaaaacggcacgatcgtcatgagcgcaagcagcagcaccgcgacaccgactgcaacggcggctgccgactgatacagcttaaatgtcgcaaacccgatgcaggcaaatccgatcagcaccgcaccgccgctgtacaaaaccgtctttccggccgttttgtaggtgacgacgatcgcctctcttatatcagcgccatgcgacagttcttctttaaatctgctgagaagcagaatgcagtagtctgtgccgattccgaacataatcgcaaccatgaaaatctgcgtaaaagttgagagcggaaaattcagctggtcgactaaaaatgcgacaatcgactggctgactaaataagatatcaatacagataaaagcggcacaaacggagcgaccactgaccggaatacaaggatcagcacgatcaggataaaagcgaccgttatatattcagtctttttcaatccgtcctgtgagctttttaacacatcttcatcgatcagcgactggcctgtaatgccgtatgatacgccgtacggtttcagctctttatcaattttatttttgatttcgaggatatcgtttttggatgtatcaagctgcagctgaacgagcatcgtttgtctgtcttttgacagcagctgttttttgatgtcgtcatttttctccccgaagtatgaagtcaccgttttaatctgaagcgcttttttctgttcagacaaagtgctgacggcttcttccagacgatcttttttgtctgtcattaagcctttttcgtgaaatacgatgacggcagaagaagacggtgcatctgaatcagacatttcatcaagcaattcatgggcataagaagaggaatatccgtccggtacggaaatctgccctttctcccgtgtcaattcagccatatcaggcgctgtaagcataaatatcaccgttgcggcgatccataccgcggcgatgatccagcgggctcggataatgtttttcattatgtctgctgatcctcctctgtcatcatcaatcgatataatttttcatatgtattaacgaacatctccgcctcgtcttcatcaaaatacataatatatgaacggacgagttcctcaatccgccgctccacacggtgaaatacttccgtccccttttccgtgacatttaaaagtatgctccggcggtcgctttggctgcgttctctattgatgtagcctttttcatacaggcggttcgtcatcgatgtaatggcgcttttgttgacgtggcacaccgcggccagttcaattgatttgcaatccggattgagcataatatagcggagtatgtaatattgatccaatgtcagctctttgttcactttttcagcgataatgctgtcaattttttttaagacgtgcaggtatacatcggaataacgctgaatcagctgctttactttttcttcatgcatcttttccccctccttccaatagttaaaatgtttaactattaaaaaggataacgacttgacgatatcatgtcaatcttcaaaataaaataaaaaaagacagtgcagattacaccgtctttaatgattcctttttttcttttgcttgtgatgagatatttaacagcgctaaaaatacagacacaatgccgcaaaaagcggataaaataaaaatcagccagcctgcatttgacatcagggcagcaaagatcggcggtcccgcagctactccgataaaccgcatgctgttataaaatgaggtgatggttcccgattcctcgttgtctacgccttctgtgatgacagcgtctaatgccggtaatgctattccgataccgataccgctgacacacaaaaagataaataataaataaaaactgtgattccaccataggccgataaacgacagtgtcacggcactcattccgaaaacgatgcagaacttcattttgccttggtctttcccgatttttctgcctgatatatatgaactgacggatagaaataaaagcgggattgccaaaagcgctcctttagccacaccgtcaattccgtatttcttctccagtgagtctgataaataaaaaagaaccccgaacagcaaaaacataatcacgcagccgatgataaataccgtaaagagccagcgtccgtcacgcttaaatatgcggccgacattttttacaaattcggaaatagaaggggcttctttttgtttctccggctttgccaccaaaaacaatacgagaaaaaaactgataagcgaaaaaaacggaatgaaccaaaacggcataaaccaaaaccatgcagccaagagcgacccgagaatcgggcttaatactttcccggccgtgtttgacgtctcaatgtcgccgagccccgcggtaatccgctcatcatcccctttgaataaatcaccgataaacggcatcactacaggagccgcccctgccgaaccgattccctgcagcacccgccccgccaagataatgggataaggatgcttgaacgcggtggaagctatcgcggcaagcgctccgcccgcaccggctatgagaagacaaggcagaagaaccttttttcttccgaatttatcggacaaatatccggcaatcggaatacaaataatcgccacaatcgaatagaccgttataattaacgatacttgaaaagacgatatggacagcttcttttcaatcatcggaagcacaggaatcagcatggaattcccgagtgtcatcacgagcggtacagaagccagagcaatgatattttttgttccatttttcttcttactcaacttattcacccattcactatacttggttgtttcctgttttattgtgccttgcggaaaacaaagtatgtattgaagcggcaaataaaaaaacagacacatgacgcgtctgtcttaaaaacgttttcttacaacatgaaaactgaacttatcagcccggaaataatttaatgaatacagcacaggttcatcattctgattatagtgggtttgcttcagcaataaaagcgccgtctccggctcgcactccaaaaccggtgaaatcgtatcgtgatatccgatcggttcgatatcggcaacggcatagctgatcacagacccggagtttttttccaaaagatcaaaaatagattcctgttcatgacagaaagaattcggcagaatgtgcatcggaatcgtatctaaacagtaaacgaccggagtgccgcttgccgttctcacgcgttccaaataaaaaagctcctgctcaggctcaagccggaatctagcgatatcttcctcagacggcgtgatgacctgagacgacaaaaaaatcgtacccggcaccatgttcgcctgctgaatcattttcgtcacgctgttgagctgttcaatacctgaaagaaacagcggttttgtatggacgaaagtgcccacaccgtgccttctgataatcacatgctcctcttcaaggatacgcaaagcttcacgcagagttgcccggctgacacccatagattttgaaagctcaaattcagaaggaagcttttccttttcggtgtaaattccgttttgtatatcctctttgattcgctcaatcacttttaggtacaagtgacgattgtcagcttttgtagacatgtttcccctccgtaaaccactttcataaattattgaacaattgggacaactatatcatgttttaataaaaaaataaataggaatgattttggtgatatcattttcagtgaaaactctctcctttttaagaagagagctcatcatattgttccttagataatagtacttccctcggtttgcttccttcatacggcccgacgacgccccgttcctccattgcgtcaatcagacgggcagctctcgtatatccgattctgaaccgcctttgaagcatggagactgatgccgtctgcatgccgataatcaaatcgaccgcttcgtcatagagatcatccgttacttcactgtgtgtttccgacacttcttccggaatcatctcttcttgatactgcgctttttgctgcgtaatcacatgatcgacgacatgctcaacctcttcatccgataaaaatgctccctggacccggacaggcttattcgcgcctacaggcagaaacagcatgtctccgcgccccagaagcttttcagcgccgcccatgtctaaaatggtccgtgaatcggtctgagatgagacgctgaaggcaattcttgacggaatgttggctttaataacaccggtaatgacatcgactgaaggccgctgtgtcgcgataatcaaatgaattcccgccgcccgcgccatctgtgaaagtctcgtaattgaatcttccacgtcggaagaagcgaccatcatcagatcggcaagctcgtcaacaatgacgacgatgtacggcagctcaggctgcttgacttcttcttcggcatttgaccgcttaatatggtcgttatagccttctatatttctcgtacccgtatgggagaacagctcatagcggcgctccatctcattgacgacctttttcaaagcctgcgaggcctttttcggatctgtcacgaccggcgcaagcagatgaggaatgccgttatacacattcagctcaaccattttcgggtcaatcatcatcatcttcacttcatgcggtttggccctcatcagaatgctcgtaataataccgttgacacagacgctttttccgcttcccgttgcccccgctacgagcaggtggggcattttgttcagttcggcaagcacggcttccccggaaatatttcgtcccaagccgatcagaagcttcgcgtccggcttgtcattgagcttggattcaagcacttcttttaacgaaaccatcgcaacttcagcattgggcacctcgatgccgattgctgatttgcccggaatcggcgcttctatccggatatccttggcggcaagcgcgagcgcgaggtcatcgctcagattcacgattttactgactttgaccccgacgtccggatacacctcatattttgtgaccgccgggccgagatgaacttgggtcactttcgcctttaccccgaagctttgaaaggtccgttcgagttttcttgcattctcgtaaatgtttttcttatcggtctgctggccggtatgtttcgggtcagccaggatgtccaatgaaggcatttgataatctttattttcaagctctgtaaacgtcatcggcggagccgcagccgtttcgtcactgtcttgagcgccgccggaaggctcatcttttgccgtttgcgccgtctcctgcgttttttccggaatcagcggttcgacgcgttcttcctgacggtctgaaaagcttgaaataatcggctctgaatggatgatcggcgaaatgatttcctcatcctcttcttcgggctcaggcatttcttttttcttctgaacccgtttttgttttttgcccgatttggtttttgttttcggcgaagacatattcgttctgaccgttttcatatcctcaagaaatgcctgccattgaccgcggataaaccggccgacggggctcgtccactttttgagcgtttcctgcagtgaacgccccgttacaagaatcagccccattaagatcagcacgatcgccatgatctgtgaacccgttgatgcaaataaaaagtgggaagctgcaaacagcaccgcgccgatcatgccgccgcccaaatcaggggaagcagcctgctgtttcatgtcaatcataaacagctcccacgtgttgccgatgacacttgccgaccgaatcgacccgtgatgagacagatttttaaagagctgcacgtgagacagcagcaaaatactggcgataatacagtacaaccctgcctttctcctcgttaaaaggcttggactcttctttttccaaaacagcgaaattccgagaaggaagagcgcaattaagcataaaataaaccactctccggcaaaaaaacggaacaagtacacaaatgtctgtcccacaacgccgagctgcaaaacagcaataatcgagattgcaacacagagcagtccgcttagttcgtattttagattgagcttactctcttgtttctttttagatttccgttttttctttgccacactcatcaccttactgcgttaaaaaatgtaaaatcatacatcatgaagaaaagcagccttttgccggctgcatttttctgtaggattcccctattatagcatattttgcccccgagaaacggactgaatgccggttagattttcagcttgattttttgtcccggagcgatgtccggattcagaaaatccatcgggttcgtacttaaaatctgtacgacttcagcttcatttcccttcatctcaaccagcagcggcacgccggcgtaatctacctgttcatgcacgctttgctctatatcctgaccgtaaacgacttcttgtggcatgacggtataaaggatcattgaatcatccttccttcctcgccctttcgttcctcaatcagctgattcagcttttttatcgcctgtccgacgccgcccacggcatcaattaatccgtaatcagccgcatctttgccgactacgttcgttccgatgtccctggttaagtttccttttgaaaacatcagctctttgaatttttcttcggaaatatttgaatgatgggtcacaaagttgacgacccgctcctgcattttatccaggtattcaaacgtttgcggaacgccgataaccagacctgtaagccgaacggggtgaatggtcattgtcgctgtctccgcgataaaactatgatcacatgacacggcgatcggcacacctatggagtggcccccgccgagtacgattgagacggtcggttttgataaggatgcgagcatttccgcaatcgcaagccccgcttccacatcgcctccgacggtgtttaagatgatcagaagtccttcgattttcggattttgctcaatggcgacgatttgcggaatgacatgttcatatttggttgttttattttgcggcgggagctggacgtgcccctcaatttggccgatgatcgtcaggcagtgaatattggtatcttgggacatttgcggcagagatgtctctcccagctgctgaattttgctcataatgctgtctttcgcatctgatttttcgggctgctgttcttcggtgttttccatacgatgatccattttatctttcaccctttccgaatgtctctttgtattatgaacaaagatgatgatttccatccgggacatgaacaaaaacaaagccggagcatcatgcgctccggctttgtatacattatacttccataatgatcggaatgatcatcggcttgcgttttgttttttcataaaggaattgattcagcgcatcacgcattgcttgtttcagcgtggaccattctacggcagatgtttccgtcgcttcagtcacgatagagcggacgagctcagtagcttgtacaattaacccctctgattctctgacatacacgaaaccgcgcgtaatgatctcagggcctgaaacaaggttcttcttctgcttatcgagtgaaatcacgacgatgagaatgccgtcttgtgacaataagcggcggtctctcagcacgatgttgccgatgtcgccgactccgaggccgtcaatcagaacgtttccgtatgtgactttatccccgattttcacattctggccgcggaattcaacgacatcacctttttcaatcaagaaaatgtcgctgcgtttcatgccgatctcttctgcgattttggaatgcgctttttgcattctgaattcaccgttaaccggaattaaatatttcggtttcagcaaattaagcatgagtttcaattcttcctgcgaaccgtgaccggacacatgcactcgtttttgggcgaaaatgacttgagcgccggcgcgggcaagcaggttgacggttttggaatatatcaattcatgccccggaatcggtgttgatgcaatgacaacggtgtctccttcttcaatgttaagctgcttgtgcgcctgcttggccattcgcgtaagagcggccagcggctcaccatggcttccggctgtaacaattgccacgtcccgcttcggatattttttcacatcctgcacaggaataaacatttcatcttcggcttcaatatagccgagcttgcgtccaagctgaagcacgttttgcagattttttccggcgattgcaagtttgcggccgttctggacggcagcctgtatcacttgctgaatccggttgatattagacgcgaatacagcaatgatgacacggttttctgaattgttcatcgcatcggaaatttcaccgcttacatatgcttctgacggagtataccccgggcgctccgcattggcgctgtcagaaagcagggcgagcacgccgctgtttccgattttggcaatttcgccaatatcacatgattgatgataagcaggcgtctggtcaaatttgaagtctcccgtgcatacaatagagccaagtgatgttttgaagctgactcccactgaatccggaatactgtgaatcgttttaaagaacgatactttcgttgattcaaatgtaatgactgatttagagtgaacttcacgtaaatcagcttttcgattatgcccgtactgcttgagtttttctctcagtaatgcaagcgtaagcttcgttccgtataccggcaccgacagcttgttcaataaataaaagacgcccccgatgttttcatcgtgcccgtgtgtcagaaagatggccttcacgcggtcagcccgttctactaagtaggaaatatccggaatgacgacatcaataccgagcatttcattttcagggtgcatcagccccgcatccactacaaatatgtctgagtcaatttcaatgacatataggttcttcccaatttctccgacgccgccaagggcgataattctgacgttttctgtatttttctttttcaaaatctgtatcctcctagtctcatacccgtccatcatcacttgttcctattataactgatatcaattttagaaaacaagaagaagcggaaggtttagggaaaaccaatatgtatacaaaacggtcaaactcacgataaaaatgagaatgaccgcgtatttcaactgtataaattttttcttacagttcgctgatgacgctgctcaggctcagacgttcatcttcattcagcgggataagaggaagacgcacagatccgacatcaaggcctttcagctgcagcgccgttttgaccggagccggattaggcgctttaaagagctccttcatgatcggcagaagcttctgatgaatcagtgccgcggttgccgtctgcccgttcgtatagtttttaatcatctgctgcatgtcagaacccacaatatggctggccactgacacgactcctcttccgccgactgcaagaataggaagcgttaacccgtcatcacctgaatagacgtaaaaatcttccggcgtttcggcaatgattttcgtaatggcatcaagatcgccgctcgcttctttaatcgcagagatattcggaatctccgcaagtctgatggccgtttccggcgcaagcgaagcgaccgttctgcccggcacgttgtaaagcatcacaggaagagacgtttcttcagctatggctttaaaatgacggtacatcccctcttgggaaggcttattataatacggcgtgacaagcataacgcaatcgacgccggcttcttcagctttttttgtcagtttaatggaatctttcgtattgttgcttcccgtacccgcaataacaggcacgcgtccgttcacttctttgactgtaaattcaaagagtgcaattttttcttccgttgaaagtgtcggggattcgccggtcgtgcctgcgacgactaaagaatccgtgccgtttttcaacaaatagtcgattaatgtagacagtttttgaaagtctacattccctttactgtcaaagggggtaatcatcgctgtagatatatttccgacattcatttttttcacctcatcatgattcaatcacatttactttgaaagttcaaacacttcatgcagcgcatttacggccgttaccatatctttttcatgaacgagcacccagatcgtcgtatggctgtcggcagattgcagaatcggaatgcctttatcagaaagtgcggagacgatttttgacgtgacacccggaacacccattattccggcgccgaccgctgacactttcgcacagctttccgtcactgtcggctcatatcctaattcagccaaaatgctgcgcgcggcttccgttttactgccggctacggtatatacgatttcactcggcgtaatgttaaagaaatctacactgattccggcatttgccattgctttaaagacttcagtctgaacgttgtattgccccattttggcgggaaccttaaattgcgtcacgtctttcacatgggcgatccccgtaatcagccgttcgaatacatcgctgccgatgttagacgaatgatgggacgtcaccaaagtgcctttgtcttttgaataagtggagcgcacgcggatcggcacctttgcctgcatggcgatttccaccgcgcgcggatgaatgactttcgcgccttgataagcaaggttgcagatttccgtatatgtgacattcggaagcggcttagcattttccacgattctcggatcggctgtcataacaccttccacgtccgtaaaaatgtcgataaactcagcatcaaccgccgcgccgagcgccgccgctgatgtatcgcttccacctctgccgatcgtcgtcgtgtcgcctttttcagtcgctccctgaaagcctgcgacaacgacggcatcatggctggcgagtgcagcgaaaagccgctctgttttcatttctataattttggcgtcagtatgctgggcattggttaaaaagccggcctgagctcctgttaaagctgcggcttttatgccgttttccttcagcatgctggaaaaaacaacggacgaaatcgtttctccgcaagacagaagcatatcctgctctctcggagaaatgtcggactggctgccgtaaaggagcccgattaaagaatctgtcgcgtacgggtctccttttcttcccatcgccgatacaacaacgacaaccttataaccttcacttatggcatcttttatgtgtgctagcgcaagcttgcggcctttgtcatcttttacggatgttccgccgaatttttgaacaatgatcttcactattttcactccaaattagtctgacgtaacagaagagagcaggcagagccttactctcttctgttcgcctatagaaaatacgtttgttttatacgaggttcagtttttgcaggctttccgcgatttgaactgagttccaagcggcgccttttaacaggttatcagaaacaacccacaaatgaaaaccgtttgctctgtccaaatctttccgaattcttcctacaaatacatcgcgtttgccgacgcaatcagcaggcatcgggtaaagctgctccgccggatcatcctgaagcgtaacacccggagcttcttttaaaagctgtttaatatcttcaacggttgcgtcatcacggtcaagctcaatgtaaacagattctgaatgccctgtttcaatcggcagtcttacacatgtcgcagccacttccagcttcggcatatgcatgatttttttcgtttcattaatcattttcatttcctcaaacgtatagccgttgtcttggaatttatcaatttgcggaatggcgttaaatgcgatttgataatgctttttgtcgcctttaaccggcataatggacggttctgcgggttcattgtttaaaatcgcctttgtctggctgtacaattctttcgccgcttcattgccggctccggacacagcttggtaagtagatacaatgacttttttcaaaccgtacgctttgcggatcggttcaagcgcagccaccatctgaatcgttgaacagttagggttggcgataatgccgttatgtttgtgcagatcaccttcgttcacctcaggcaccacgagcggtgtattttcgtccatacggaatgcgctcgtattgtcaatcacgatggctccccgttttacagcctcaggcgccaagctttgtgatacgcttccgccggcgctgaataacgcgatatgaacgccttcgaagctttcaggaacagcttcctgcactgtatattcttcgcctttaaacgttactttcgtaccagcagaacgctttgaggatagtagtgtgagtgtttcgatttcaaagtttctgtcttccagtgttttcagcatttgctgtcctacggctcccgtcgctccgacaactgctacgtgtaatcctcttcccatctgtaaaactccttccgccaattaagcatcatttgttgaattgactttgcattttacgttttattttaccatagaatagtcacggattgaccgaatttttttattccggaatgattttctgtcatcatgattttttattcatgatggtgtacgagcaccggctgaacctgctggtgcaaaagagctttttctaccgtaatcggaaggagatccattctggcgacgagcgatgtcggttttttcacgtggtcatcctggccgaacgggatgaaatatatgttttttgcggacatcagcctcattaaattcgttccgtttaaaccgagtccgtcatttgtcgaaattccgagcacgaccgggcggccgttgcggatcgtggctttcgcagccataaggacggggctgtcggtcatcgcatttgcgagtttgctcattgaatttccggttaaaggggcgatgaccatgcagtcgagcggaagtttcggcccgagtggctccgcttttacgatggaatcaatcgcctcaaagcctgttgtttcttcaatttttctgacccaatctcccccctccccaaagcgggtatcggtcgattgaacggttgatgtcacgaccggccggacttcagctccttgactgataagcgcctctatttgcggaaacacttcctcatatgtgcaatgcgagccggttaatccgaatccgattcttttccctttcagagacatggttatttcccctctttctttaagtctgccaaaagcttgctcaatacgttcgcaataatctgtccggctgttttcggggccacaattcccggaagacccggagcaagcagcgctttaatgccttgtttttcagcatatttgaaatccgttccgcccggacgggatgctaaatccaaaatcaaggtcttgggcgtcatgcgcgataaaacgctttgattcagaatcaagctcggtacggtgttaatgcagatatcaatatcatttacatgatcagtaagctcttcaagttgaaaaggagaaagccccatttccgatatacgggctaaatgagccgaactccgcgcgcccacttttactttcgcccctaacgctgcaaacgtccgggcgatcgtcataccggtgcgccccatgccaagaacggcgacatttgatccgtgaatggtataatccgtatgctgaatcgccatcatgattgttccttcaacagtgggaatcgagttgaatatcgcgatgtcgtcccgctcaaataatttcacaagcttacggccggcttcgctggcgatcccctcaagatacgcgttggagatgcctgaataaatgacgcaatgctccggtgtccgctcaagatagctctgctttaataccacttcttcatttgaaaaaaccgtggaaacaacgccttctccggtcgttgccgatacaggcaggatgatactgtctattttttgaaagggaatctcatcaattttgcatttgacggttcctgtaaaaccgtcatccaattggtcaaaccctgcaagataaatatcggcatgctgttctgtcagctttcttataatctcaagctgtcttgcgtcaccgccaatgatcgcaattgttaatccggttaacatctgaaacgttcaccttctttacagttactggatcctttaagtgtcatcctcctcttcatcgtatgtgcaaagagaaagggcggtgaatgtacagcgtctttttcataaaaaaagcaccggctgtatgagccggtgcttgcaaaaaatgaataagatctactcttcgggaggcgtgatctcccccggaacgtctaaaatgatcatgtctgacccgattttttggatatggttccaggggacgcggatgtcgtggccttgttttcgcagtccgaaccattttaccgtcggtatcaacagcgcggtaatttgtccgtcctgttcattaatttccaaatcggtctggccgagcacgccgagccgctctgcccgtttaatatccacaatttctttacctgacagttcactgagcctcatgatagccacccccttgtactatatgacccggagcaaaaaaaaatgcctgccccgtacagaggcagactgctttgcagcttaagacgaggccggtatattgccggtcgggctgatgagcgatagtgcgtaatcatccgtaaataagcggcggctgaggccgttgacgctttccaggctgaccgcatttaattcagcgataatttcatccatggtcttatgctttccgagcaggagttcatttttcccgttccggctcattttgctgtttgtgctttctaagctgagcattaagctccccttcatttgctctttgctgttttccagctctttcggggtgataccgtcacgttttagaaccgataacgtttcctgaatggtttcagacagaagtccgagctgattcgcgccggtgcctccgtaaatcgtcagcataccgctgtcttcataggaactgtgatagctgtatacagaataggccagtcctttatcttcgcgcacatcctggaaaagacggctgctcatgcttccgccaagcacgttgtttaagacgatcaaatcgtaaatgtccggatctccgactttcaggcctttgaaaccgagacagagatgcgcctgttcggtgtctttttttctcgtcagcttttcataatgaaactcaggctcgctgatgccgcttgctttgcccttcgcttcgtatgtaccgaaccatttctccacgtctttaatgaattgttccgttacatttccggcgacagaaatgacgacgcggtccggcgtgtaaaagtcatccatatgctgtctgagagaatcgccgttaaacgacgaaagcgtttcctccgtcccgagaatcgggtatccgagcgaatgattgccgtatgtcgctttgctcagcagatcgtggacaatgtcatccggtgcgtcttcatacattttgatttcttcatatacgacgttcttttcttttttgagctcatcttcgtcaaaagcagaatgaaagaacatatcagccagcacatcaagtgcgtagtttgcatgctcatccagcactttggcgtaatagcacgtatattcttttgaagtgaaggcattcacttggccgcctatccgatcgaaggattctgcgatttcacgtgcggacctggtatttgttcctttaaaaaacatatgctcaagaaagtgcgaaataccgtttgtctccggcgtttcatgacgtgatcccgtcccgatccatacgccgattgccacagaccgcaccgttggattattttcaagcacaactcttacaccgttttggcatgtatagcgttttatcaagtctgttcctcctattcaaagacaggcagctgcctgctacttcatcagcctgttttcatccattaagtcagacactgagccgagcgcgtagcctttttctttgatttttgcaatcagtgtatccaggcttttcgcagtcggatcagtcggatgcattaaaatcatggctccgttatgtattttgctcagcacccttgtttgtaaaacagcgggagacggtttttgccagtcaatggtgtcaacggtccacatgatggtgcccattcctttttccgccgcaaggtcgaccacggcttttctgaagctgccgcttggcggcgcaaaccatttcggcttcatgccgagcgtctcgctgatttgtgcattggttttgtcgagctgttcggaaatgcttcctgaagtcagtttgctcatatcagggtgattgtatgaatgatttccgatttcatgtccgtctgccgctatttttttccccagttcctgattgtttttcagccatttcccttcaagaaagaaagttgctttgacctggtgctgcttcagaataggcagcatttgctccacgtattcatttccccaggcgacatttatcaggaaagcgaccatcggtttgtcgggatttcctttataaatgggttcgggcgcgagagaatcaagatggactttcggctttacctgctcatagacaaggtcgtcttcgtgaaattctccgtcctttttcatttgtttataggatttttccacattgacttttaaaccgttatatcccggtatactcttccatattttatcaatccgagcgtcttgcggcttcacttcatactctgacgctttttgcagtaattcttcatagagcggatcttttgatgatgacacagttaccgcgtcttttttcattgcgtctatgtaatcaactgtatacgggttttttaacatttcaaacgaaacaaaaaaaagaaataaaaaaacggcaaacggcacgaattttttcaacatgtccttccccctcatcacacattatgtatgaggaggacaaggtagaacccgtctgttgtctttctcaaaataaagaagccgggtctcccaggctccttgttaggttttcatttaagattgttgttgttcctgttctttttctttctcttcgcgcagcactgctttacgcgacagattcactcgtccctgtttgtcaatttcagttaccttcacaaggatttcgtcaccgattttcacaacatcctcaaccttgccgacccgttcgagcgctagttcagagatgtgaacgagaccgtcttttccgctgaagatttcaacgaaagcgccaaatttctcaatccgtttcactttaccgaggtaaagctggccgacttcgacttctctgacaagatcttcgatgatttttttcgctttttggttgctgctttcatcagtagaagaaataaagatggtgccgtcttgttcaatgtcaattttaacaccggtatcttcaatgattttgttgatttgtttaccgctcggtccgataacgtcacggattttatccggattaatggtcatcgttaaaattttcggcgcatattgagaaagttcttttcttgattcaccaagcgtgctgagcatgctgtccaagatttccattcttccttttttcgcctgctgaagcgcttcttcaagaatttctcttgaaaggccttcaattttaatgtccatttgcagcgctgtcacgcctttttccgtgccggctactttaaagtccatgtcaccgagggcgtcttccatcccttgaatatccgtcaatactgtatagtactcgcctgatttcacaagtcccatcgcgatacctgcaacaggggctttaatcggaacacctgcgtccatcatggcaagcgtacttgcgcagatgctggcctgtgaagtggaaccgtttgattcaagcacttcagatacgaggcggaccgtatacgggaagtctttttcattcggaatgaccggctcaagcgcacgctctccaagagcaccgtgaccgatctcacggcgtcccggtccgcgcatcgggcctgtctcccctacgctgaactgcgggaagttataatgatgcataaagcgttttgactcttccacgcctaaaccgtcaagaatctgaacgtctccaagggcgcctaatgtacaaacgctgagcgcctgcgtctgtcctctcgtaaacagcccggatccgtgcgttctcggcagaagaccgacttctgaagaaagcgggcggatttgatcaacgccgcggccgtccggacggactttttcttctgtgatcaaacggcgcacttcgtttttcacgagtttagacagtgtctgtttcacttttttaattgtatcttcatcatgctcttcttcttcgaatttcgcgacaactgcatttttcacttcattgatcgcgtcttcgcgagcatgtttttcgtgaacctgaatggcgctgagaagatccggctccgcaaggctttttacttttgcgctgagctcttcgtcaatttcatacagttcgatctctgttttctctttgccgactgctgcgacgatttcttcttggaatgcgatcaggcgcttgatttcttcgtgaccgaacataatcgcctcaagcatgatttcttcaggaacttcatccgctccggcttccaccatgttgatggcatcttttgtgcctgcaacgatgaggttgatatcacttttttcaagctggtcaaccgtcggattgatgacgaatttcccgtcaatgcggcctaccgtcacacccgcgatcgggccttcaaacgggatatcggaaacgcaaagagcgagtgatgaaccgaacattgcagccatttcagatgagcagtcctgatcaacactcatgacaatgctgatgacctgtacttcgttacggaatccgtctgcgaaaagcgggcggatcggacggtcgatcagacggctggctaaaacggccttttcacttggacggccttctcttttaataaaaccgcccggaattttacctactgcgtataatctttcttcatagttaacggtaagcgggaaaaaatctagcggtttcggttcttttgatgcggttgctgtgctgagcactgcagtatcgccgtagcggaccatgacagcgccgtttgcctgtttggcaagctggccggcttctactgtaagctgtctgccggcccaatctatggtaaagacatgtttctcttgtcccattcgattacgagctcctctcttaatgtgtgaaataatcaattactcctattatgaacgaaatgaattgaacatatcaatgtcaaagtagtatgtaaaaggatttcattgtttttttattattatttttttcgctttaatacgataaaaaagcgggaatcctcccgctttttacgattatcgacgtaagcctagtttgttaattaactcacggtaacgagttacgtctttattacgcagatacgtaagaagattacgacgtttacctaccattttaagaagaccgcgacgtgagtggtgatctttcttgtgagtacgcaaatgctcgttcaagttgttaattgagtctgttaggatagcgatctgaacttctggagaaccagtatcagattcgtgtgttttgaactcgctgatgagttgatttttacgctcttgagtaattgccatcctgtttcacctccatatcataattagccccagttacctagcaaccgtcggtgacttcggattgccaagcaatggttttaagactacgaaacatatgatactaaaaatcgcgcccatatgcaaatcttttagaataaaatttgtgtacttttgatgttttttccgttatttgctgaaaaaacggatcgcttcttgtttgtctttcccgatctgagccgtcagttcatcgatgccgttaaacttccgttcgcttcggattcgtttgtaccactcgattttaacgtcttctccgtatacatcctgttgaaaattaaacaaatgaacttcaattgacggctgatcgggacgcttttcataaaaggtcggtttgtagccgatgttgcagacgccttcatacacctcgccttttatttcggctttcactgcatacacgcctgtcggcggcacgatatagctgttgtgcaggccgacattcgcggtcggaaaaccgatggtgcggcctctcttgtctccgtgaatcacagtgccccggagaaaatacggctggccgagaagagtgtgcgcaagttcaacgtcaccatcctggagcgctgaccggatataagtggagctgatctttctgtcctgctcggtctgtttctcgacagtcgtgcatccggccttgccgtttaaatcgtccggcagcgtctccatcgtgccttttccgtattttccgtacgtaaaatcgaagcctcccacagcgtgccgcgcgttcaaccctaaaatatactcctcggcaaactgttttggagacagagacgcaaacgcttcatcaaactttacgacatacagcacatcagcgcctaaacgtccgatctggctgattttatcttcaagcggcgtaatcagatcctttggctctttgtccctgcccaacacatgggaagggtggggatgaaacgtcataacggccagcgacaggcctttttcttcggcaatttgtctggctgttccgattactttccggtgtcccaaatgaacgccgtcaaagtagccgagcgccatgacagacgccggctgctcttctttttgtaaatgatgcggatgagaaatatgtatcgtcttcacagaacggtcaccttttttcttattgttcgcttttttgcatgagcactttagccggtttcagcagtcctttttttgaaggatgcggcatataaatggccacacattctccgtcttcagtacagaccgctatacgggcgtcagctgtcattgcagaaaattccgccgggatgtcaaacactgacccgttttcagctttcttagctaatgtatcacttatgacccatttcggcaaatgattgagcgctctatcgatcggcacggcatgctctgcaaccgttccgtccgaaacctgctgttcaagttcctcaaacgtgaaacactcatcaaggctgaaatcgccggaagcagtgcggatgagatgcgacatatgcgcgggatagccgagtttttcaccgattgtcaccgccaacgttctgacgtaagtgccttttgagcacgtgactgtaaagcggaatgatgctgtgtcttcgttataagtgacaggggaagtgagcgcgatatcttcaatcgtgatattccgcttcggccgctccacttcaatacccgctctggcgtattcatagagctttttcccgttgacctttaccgcggaatacatcggcggcacttgctcctgcggtcccttcaattcgtctaaaacggctttgatatccgcttcttccagcggctccctgacaggctttacgctgaccgtttctcccgtctgatcttcggtcgatgtggagaaaccgagagtgatctcagcatcgtacgtttttgacttgtcggtgacgtactcaacgatctttgtagcccgtccgacacagatcggcagtacgcctgacacttccggatcaagggttcccgtatgcccgactttctttgtttttaacagttttcttattttcattacacagtcgtgagaagtcatgccgaccggtttatgtaaaaggagaactccgttaaccatctgtctttcgctcctttgttatcaattgtatcccgtaaaacgcagaaaagaggacagacgacactcgcccatcctctttcccgttattcagacggtttatctgaatgcagttcgtgaatcaatgtttcaatacgattgccgtactcaattgattcatcaaattcaaattcaagctcaggcgttttgcggagtctgattcggctgccgatttcggaacggataaatcctttcgctttctcaagccctttcagcgcctcttctttctttttctctccgccgagaacggagatatacaccttcgctatttgcaaatcacctgaaacacgtacgtctgttacagtgagaaatccgattctcgggtctttcagctttcggctgataatatccccgagctcttttttcatctgctcgccgacacggtttgctctcatactcaattcaatcacctctaagttaaaaccactctgttctagtgatcgtccgttctatctcgggaaaggagtcaataaacgcgagtacgcgctggatctccttttccgcctgaacgtgagaggaagagacgacagcgattccgaagctggtccgctgccaagtgtcctgatagccgatttctgcggccgacacgttgaacttattctgaaccctcgttataatccgcttcagaacggctcgtttctcctttaatgatcccgcatcataaatgatgcattcacattccgcaaatccgatcactttctttcgatttcctgcatgacatacgcttcaaggacgtcgccttcgcgaatgtcattgtatttcttaatcgttataccacattcatatccttgtgaaacttctttcacatcatctttgaagcgtttcagaacgtctacttccccttcgaagatgaccacgccgtcacggatcaggcggagtccgctgtcacgtgtaatgtggccgtctgttacatatccgccggcaatcgtgccgattttcgacactttgaatgtttggcgcacttcaacctgaccgatgactttttcttcgtattcaggatcaagcattcctttcatcgccgcttcaatttcttcgatgactttgtaaatgatacggtgaagacggatatctacattttcagcttcagccgtgctcttagcatttccgtctgggcgcacattaaacccgataacgattgcatttgaagctgatgcgagaatgatgtctgattccgtaatcgcaccgacgcctgtgtgaatgattttcacttttacgccttctacttcaattttttgaagagcggctgttaacgcttcggctgaaccttgaacgtcagcttttacgattaaattgatgtctttaacatcgccttgtttaatttgttcaaacagatcatcgaggctcagcttcgctttgtcgctgcgctgttcttccagttgcttggaagcgcgtgcttcaccgacagaacgggctgttttttcatctttaaagacgaggaattgatcgccagcctgcggtacgtcgtttaagcccgtgatttctacaggtgtggacggtccggctgttttcacgcggcggccgagatcattgaccatggcccgcacgcggccgaatgtatttccgacaacgatcggatctccgacatgcaatgttcccgtttgaacgagaagtgttgcgacagatcctcttcctttatcgagctcagcttcaataaccgttccttttgcctgacggttcggattggctttcagctcttccacttcactgacaagcagaatcatttcgacaagctcgtcaattcccttgcctgtaagagcagacagaggaacgaaaatcgtttctcctccccatgcttcaggaacgagtccgtattcagtcagctcctgcatgacacggtcagggttcgcgctttctttatccactttattcacggcaacgataatcggaacctcagccgctttcgcatggttgatggcttcgactgtttgcggcataacgccgtcatcagccgctacgactaaaatggtaatatcagttacttccgcaccgcgcgcacgcattgttgtgaacgccgcgtgtcccggagtatctaagaacgtgatttttttgccgttttcttcgatctggtacgccccgatatgctgggtgattccgccggcttcaccttcaacaacctttgtttttctgatgctgtcaaggagggtcgttttcccgtggtcaacgtggcccatgatcgtcacgacaggcggacggatttgaagatcttcttctttgtcagcctcttcatatttttcaagctcagtttcttcaagcacaatcacttcttctgtttccacaccgtattcagatgcgatcagttcgattgtgtctttgtcaagctcctggttaatggtagccattacacccagaagcatcagttttttaatgagttcagacggttctttgccaagttcttcggctaaggccccgactgttaaagagccggaaaacgtaattttctcaggaagctcttttttcggcttcagcggtttttgctgatactgatttttgttgttatgattgcgtttgtttttgtttttgttgttgttgttattcttcttgtttttgttaaattgattattctgcacgtcattcttctttccgtctcgaattttgtttggttgattcccagcaggctgctgattaatcccttgcggcttgtttttgttcgtttccgcaggcttctgagatgtaacgccggcgccgccttttttaaatttcgcatcaagctgcttaatggtcttttcttcaagcattgccatatggttatttactactatatccatgtttttcagcgcagtcaaaatttccttgcttgaaacattgatggcttttgcatattcgtaaactctcattttagccattcgttcacccccaaaaatattaatcgagcaagctgatcagcttattcgcaaaaccttggtcagtgacggcgacaacgacacgtgattccttgccgatagagcggccgagatccgcgcggctttcgacttttttataaggcactttataataattgcatttatcggatactttttttgcagtattcgcagatgcatcttctgtcagcagaacaagttttgcacgcgcatttctaatttcttttataaccaagtcctcgcccgacacgaccttacgagctcgattggccagacccagcaagggaaaccattccattccagacatgttattttttcaccttttccgccagttccagcaattcttcgaaaatctggtcatcgatttgtgattgaaattgattttgcaatgtgtttttctttttcgcagctaagatgcattctttctcaagggtgatataggcaccccgcccgttcttctttccggtcggatcgactgaaatctctccttctttagaacggacaattcggatcagttcctttttaggcttcatttcccccgttaccacgcatttgcgcagaggaattttttttcgcttattcacctaaagtcacctcttattcatccgattcggctgtttcaggctccataaagagcggctctaaatcgtcatcttcttcatgctctctcggatagatgccaaggtctcttgcatccgtttcacttttgatatcgattttccagcctgtcagtttcgcggctaagcgggcgttttgccctctttttccgattgccagagaaagctggtaatcaggaacgatgacagtcgtggctttttcttcttcgctgacgatgacatccagtactttagacgggctgagcgcattggcaacaaattcaaccggatcatcagaccagttgacgatatcaattttttcgcctttcagttcattgacgatcgcctgcacccgctggcctttaggaccgacgcatgaaccgaccggatcaacgtcagggtcatcagtgcggacggagattttagagcggtcgcccgcttctctggcaacggatttcagttcgaccgttccgtcataaatttccggcacttcgatttcaaaaagacgcttcaacagaccaggatgcgttcttgatacatagatctgcggcccttttgtcgttttttcgacttttgtgataaatactttaatccgatcgtgcggtttatagctctcattcggcatttgttcattgacgggcagcagcgcttcaatcttgccgagagacacgtaaataaacttgctgtctaagcgctgtacaattcccgtcatgatgtcttcttcacgatcgataaattctgagtaaatcacgccgcgctcagcttcacggacacgctgcgtcaccacttgtttcgccgtctgcgcagcaatgcggccgaagtctttcggcgttacttctatttcaacgacatctccgacaaggtagttcggatggatgtgctgggcgtcgtcaagcgagatttcaagtcttgaatcgtatacctcgtctacgacatcctttcttgcgaacacgcgaatcgtgcccgtctcacggttcagatcgacccgtacgttttgcgcctggttaaaatttcgcttatacgcggaaattaaggcagcttcaattgcttcgatgataatgtctttactgatgcctttttctttttcaagaatagtgagagcatctaatagttcactgctcatgttagcggtctccccccttaaacactaatacttcattcattaaaatgttacagctaatcttgcgttagctattttttcatacggaatattgacccgtttctttcttgttttgaccgtcatctctattgtaacagtttgtccatcaaattcagccaatttgccttcaaacacttttaaaccgtcaatcggttcgtacgttttcatgtacacatttttgcccagtgatttttcgaagtcggcttttttctttaatggacgctcggctccaggagaagatacttcaagaaagtagttctgagtgatcggatcggcctcatccagcttttcgcttaacgcttcgctgactttggcgcactcctcaatatcaacaccgttatcggaatcaataaacacgcgaaggaaccagttttgaccctctttgacaaattcaatgtctacgagttcaagctgaaggtcatccagtatgggctgagccattccttgaacggtatcagtcacttttttgctcatgtttttcctccttgtgctgtcgatatcatatcagccgttcctctgcataaaaaccctgcttcaaaagagcaggggcattgagaaaacgatggacatgtcgaggcaaaattgcctgttcaatacaaaagagcgggtttccccactctttgcctcggtaatcgttagcatttccaataaaactataccataaccatatatttaatgcaaatcaaactccgctcggaggctgtgcacaaagcttaaaacagagacagctgattttggtccggaagcgactcaagacagccgtgacggtctaaatactctaaaatggtttttgacacttttcctcgtttttgaagatcctcttttgaaaggaactccccttcttcccgtgctttcacaatattgagagcggcgttggttccgagtcccggaattgagttgaacggcgggatgagactgttgccgtcaatgataaattccgaagcgctcgaacggtatagatcgaccttctggaaggaatagccgcgctcacacatttcaagcgcaagctctaacacggtaaggaggtttttctccttcggcgaagcatcaagccctttagagctgatatcatccatcaccgctctgatggcggtcgagcctttaatcattgtatcaatgtcaaagtcatctgcgcggacggtaaaatacgcagcataatataaaagcgcgtgatgcactttaaaataggcaatccgcaccgccatcagcacgtatgcggcggcgtgggctttcgggaacatgtatttgatttttttgcatgaatcaatataccagttcggcacattgttctttttcatttcttcttcccattccggcgtcaggcctttgcctttacgcacgaattccatgattttaaaggccagtgaaggctcaaggccctgataaatcaagtaaaccataatgtcatcacggcagccgatcacttcgctcagttcacacgtattgttgtgtatcagttcctgcgcgttgccgagccatacgtccgtgccgtgggaaagcccggaaatctggacaagctcggagaacgtcgtcggcttcgtatcctcaagcatctgccgcacaaatcgcgtcccgaattcaggaataccgagcgtccccgttttacagccgatctgctcttcagtgacgccgagcgattctgtaccttggaaaatcttcataacttccggatcatctgtcggaatcgtcttcggatcaattccgcttaaatcctggagcatccggatgactgtcgggtcatcgtgccccaatatatcaagcttcagcaggttgtcatgaatggagtggaagtcaaaatgagtcgttttccattcagaccccgtcgcatctgccgggaattgtatcggggaaaaatcgtaaatatccatgtaatccgggacaacgataatccccccgggtgctggccggtcgttctcttaacgccggtgcagccctgcaccagacggtcgatctccgcgccgcgcatgtgtaggttgtgatcacccgcatagcctttcacatatccgtaagccgtcttttccgcaacggtgccgatcgttcccgcgcgatacacgttatcttcaccgaacagcactttcgtgtagttatgggcatggggctgatactcacctgagaagttcaagtcgatatcgggtactttgtcacctttaaagcctaagaacgtttcaaacgggatatcatgcccgtcctttttcaaaggtgtgccgcaagacgggcagcttttatccggaaggtcaaaaccggaaccgactgatccgtcattaaagaattccgaatatcggcagctcgggcacacatagtgcggagcgagcggattcacttcagtaatttccgttaaggtcgccacaagcgatgaaccgacggacccccgggagccgacgagataaccgtcatccagagaccgttttacaagcttatgggagatgagataaataacggcgaatccatgaccgatgatgctttttaattctttttctattctcgcttccacaatttcaggaagctcttcaccgtaaatgcttctggcgcgctgatagctcatttcacggatttcttcatcggctccgtcaattttcggcgtgtacagatcgtctttgatcggtttgatctcattgatcatcgaagcgactttctgcgtattgtcaaccacaatttctttcgctttttccgcaccgagaaaggagaaagcatccagcatttcatctgtcgttctgaagtgcactttaggcagttcgtgcctgtttaacgggttggcgccgccttgggaagatattaagatcttccggtaaattttgtcctcatcgtttaaatagtgaacatttccggtggcaacgaccggcttattcaatttttccccgagcttcgtgatgttggcgatgatttctttcagcgctttttcatcccggacgagctcaagctgcagaaggtgtctgtatacttccggcggctgcacttcaagataatcatagaatgatgcgatatcttcaacctcttcaggtgatttttgcatcatgccttcaaagacctctcccctgtcacaggcagagccgattaacagaccttctctgtatttattaagctgcgacctcggaatgcgcggcactctgtagaaatattgaatatgagaaatagacacgagcttaaacagatttttaaggccggtctcatttacggcaagcaatgtagcgtgataaggccttgatctttgataagcattggattgtcccatattctcattcagctgatcatgataaaaaatgtctttttcagcggcatctttgagcattttcaacagcaggtagcccgttgcttcagcgtcaaagaccgctcggtgatgctgggttaattcgatatcaaacttcttacataacgtatttaagcggtgatttttaaactcaggatacaggaaacgcgcgagttccagcgtatcaatgactggatttttcgctttttccgttttcagtagacgcttgtacgccacatttaaaaatcccatatcaaagctggcgttatgagccacaagcacgtcatcgccgatccattctttaaaatcccggacgacgtcaacgacatcgggagcgtcgcggaccatgtcatccgtaatcccggtaagctctatcgtcgttgctgacagcggatggtgcggattggcgaacgcttcgaatttatcgatgatttctccgcctcttattttgactgcggcaagctcaatgatggtgtcatacactgcggacagacctgtcgtttcaacgtcaaagacgacgtatgtgtcttcttccaaaagacggtgagctggattgtatgcgatcggaacaccgtcatccacgatattggcttccattccgtaaatcattttaatgccgtgttttttcgcggcggaataggcatccgggaaagactgcacaacggcatgatcagttaacgcaatcgcttcatgtccccattttttcgcctgttcgacaagctttccgatgcccgttacagcatccatttggctcatcggagaatgcagatgaagctcaacccgtttttcgccttcaggagcggtgtcttcacgggttttggcttttatttcattcacgtcatttgcaatcatgacgaggtctctgacgaatgtatcgttttgaatgcttccccgcgccttcacccacatgccttttttcagcgttttcatcaaagcggcgtcttctttttctctggcgaacatttttactaaaatactgtttgtatagtccgtgattttgaaaatgcagagcgtgcgtccgcttttcagctcgcgtgtttcagcatcaaacacaaacccctgcaccgtgattcttctttcttcatccatgatgctgtcaagcgtccggatttcttcgttctctttaatttgatagccgatgacaagcgggccggacggcgcttgatcctcatcgccctctttttccttcttctccatttcgataagcgcctgcatcgcccgctcctgatcttcagcaagcttttgctcgcggaatttctggacttcttggtcagatacgaaaatttcggtatccagctgcagttccggaaatccgaattggcgatagctgtgctgaatcagtgcgctgtatttatttttgagcgccgatgcttctgtatctgtttttgttttcacgatcagtttgtttcccttgagcttcggcttctgctgattcaaaagagccaccatcggcggcgaggttccttcaagctcttcaatacagcgtgtccaataatcctgtacaagctcctctgtcactgtaggatcgatgacctgaacagacgatgtgacacgggcgatgtgagcaaacgattgtgttaacctcatcatgaatgaatcgtatatttgatacggcaaaagagccttaaagcgaaattggaaatgccaggctttttctgctttatggattgtcagtttatcaatctctccgtcttcaaagtatgtcatgaaggtatcatctgtcatattaagctgctgcagaagaatctgaaactgtcttctgtttactgataactgttccattcagacagtatccctcccttaaaacatcataagtgaaggtacctccgcaggtgatgaggtaccttcttttttctctattttaacatgattttgtacgattcgttatggtgattacttcgtcttaataaattcagaaagctcatccactgaaacttcagcagattcaccggttttgcggattttcacttctacgatgccttcgtcggcacgttttccgacagtgatgcggatcggaaggccgatcagatcagaatcagcaaacttcacgcctgcgcgttcagcgcggtcatcgtataaaacctcataaccttccgtctggaattttccgtaaagctgttcagcaagctctttttgcgcttcatttttcatattcagcgccaaaatatgaagatcatacggagcaacgctcttcggccagatcaagcctttttcgtcgtgatgctgttcagcgatggcagaaagcgttctggacacgccgattccgtaacatcccatcagcatcggctgcgcacgcccgttttcatcaaggtatgtcgcattcatcgcttcagagtaacgcgtgccgagtttaaagacttgtccgacctcaatcccttcagcgaaacggatcgtgccttttccgtcaggtgacggatcgccttcctgaatgattcgaagatcggcatacgcttttacagacgcgtcacgttcgatgtttacgtttcggtaatgacggtctttttcattcgcgccgcaaacggcgtttaccattactttcacggcttggtcggcataaatctcaatgtcgccggcagcgccgatcggccccgcaaatcccggctccgtgccaagtttctccgctacttcttcatgagacgcaagctcaaccacttccgcgttcagaaggtttttcactttcacgtcgttgacctcatgatcgcctcttactaacacgagaacaaatcggtcatccgctttaaacagcattgatttgatgcaggcgctcggctcgatctgcaagaacgaagcgagctcttcaatgcttttgacatttggcgtatcaattttctccaatgcctcgggtgtttcatctgacggctcgctgttcatgacaactttcgccatttccgtattggctgcgtaagaggatccatcggaataagcgatggtatcttccctatttcagaaagagccataaattcatgcgtgtcttttccgcccatcgcgcctgagtcggcaataacgggacggacgtttaattcacagcgtgcgaaaatgctgctgtatgcgccgtacatgttttggtacgtttcctccagactttcttcagaagcatggaaagaatacgcatctttcatgatgaattcgcgtccgcgcaataacccgaaacgcgggcgtttttcatctctgaatttagactggatctggtaaagagtgagcggcagacgcttataagatttcacctcatcacgcacgagagaagtaatgacttcttcatgtgtcgcgcctaaagcaaattcacggccgtggcggtctttcagacgcattaattcaggcccgtacgtataccatctgcctgattcctgccatgtttcagcctgctgaagggccggcatcagcatttccaccgcgttgattttttccatttcttcacgcacgatcttctgaatgttttgaatgaccctgtaagccaggggcatgtagctgtaaaccccgctcgtattttgtctgataaatcccgctctcagcagaagcttatggctttttgcttcagcatcagccggcacttctctcagggtcggaataagcgtcaaactttgtctcatgtcttcgcacctctgattttttactagtcaattataagaataaacgctggatatcgttccatgtgacaaccagcataagaagcattaagaaagctacgccgataaatacgacaaatgcttccttgtcacggtttatcggcttgccgcggattgcttcaatgaataaaaacagcagccgtccgccgtcaagcgccggtatcggcagcaggttgacgattcccaggttgatgcttaaaaacgccgcaaactggaataggttgataataccggtttttgcaacttgatccgtcatatcataaatgccgacaggacccgaaagcatatcaagcttaaactggcctgtcacaagtttgctcagattggtcaggatcgcttttgtgacatcaacggtagatgtcgcgccgtaagcaatcgctgcaagcgctcctttttcagtcggcgcataagagccgaagcggccgattgtttttttattttcatcttttacagcttcaggtgtaaccgagatatgaaacgatttgccgtcccgtttgacggcgacatcgatttttttcccgggattttcttttaccgctgtcacgatgtcggtccatgacctcattttttcaccgttaatgctctggatatagtcgccttcttttaaaccggcagcagctgcgcgtccattgtctgtcagcttcccgagctcaggctgatttgaaggcacgccttgaatgaatccgagcatgacgagaatgacatacgctaagatgaagttcattatcggaccggcagcaatcgccttaatccgcttccatacgggtttagacccgaattgtcgattgtaaggcgcaatctgcacttcttctccgtctacgataaaaaaagaggtctgactgacagtaaagcccgccagttcatcttctttcccctgctcgtacccggtaatcttcatttcgtgctcaagatcagccgtctccacctcgataattaaagcgtcgggatatttttccttttgattaatgatgactttttccacttcgtcatctttattaaaaagaagcccgacggtataaccgggtttgacttcgatcatctccgggtcttcaccggccatgcggacgaaccctccgaccggaaggagtctgatcgtatacacggtttcattctttttaaatgaaaagattttagggccgaagccgatcgcaaattcacggcaaaggattcccgctctttgggcgagcaataaatgcccgagctcatggaaaaaaacgagcgttccgaaaataataataaacgcgataactgtattcacgaacataccaccttatgtgagtattgaattaacgtatccccgggtgtctttgtccacttcttggatatccgcaagactcggatcctgaattacgctgtggcggtccaatgctttttcaatcaggtcctcaatcgataagaatgaaatccgtccggcaagaaaagcggcaacggcttcttcgttggccgcatttaaaaccgtcggcatcgttccccctattttacctgattcaaaggcaaattgtaagcagcggaacctttcaaagtcagctttcgcaaaatgaaggcttccgatctcccataattcaagcctttttgtttcaggcagaggcagccggtccggatatgtcagcgcgtattgaatcggcaccctcatgtccggatttccgagctgggcgatgacgcttctgtcgtgaaattcaaccatcgaatgaatgatgctctctttatgtaatacaacgtcaatctgttcatacggaatgtcaaacagccaatgcgcttcaatgacttcaagccctttattcatcattgtagccgagtcaatcgtaatctttgcacccatcgaccagttcgggtgattaagggcgtcggcaatcgttacagactcaagctcctgccgcgttttatccctgaaactgccgccggatgccgtaatgatcaggcgctcgatatttttgctctgttcgccttgcagcgcctgaaaaatagcggaatgttcgctgtcaaccggaagaagaggaacaccgtatcgttttgcgtgtcctttcactatatgcccggcagtgacgagagtttccttatttgcaagcgcaattgtttttttctgttcaatcgctttcaaagtcgggattaaaccgacgcttccaagcagcgcattgaccacgatatccacttcgtccatgactgccgcttcaatcaggccttcttctccgatgccgatttgacattcatgcgaaaaagacgcttctttcactttttgatatgtatccatgtcgccgactgctacatatttcggctgaaacgttctgatcaacgggatcgctttctcggcgtttttaccgaaagtcatcgagacgagacggaactgatcttgatgcatgcgcaatacgtctaacgtctgctccccgattgatcctgttgctcctaaaagacaaatattcttcaaaatgccactcccattctatgcgtccagatcggtcttattttcatattagcctttctcatgaaaaaagcgcaagcagaaagtataagaacggcatgacaaacaaaaagctgtcaaatcggtctaaaatgccgccgtgcccgggaaggattttccccgaatccttcacatcatagtgccgcttaagcgctgattcaaccaaatccccgatctgtccgaacacagacagaacaagcgtgatgaccaaaagaaccggatatgaaatcggaaggtgagcaaacagctgaaaaacggccgtaaaaataagggcgatgacaataccgccgagaaacccttccactgttttgttgggactgatttcgggccacagcttccgcttcccgagcgactttccgacgaaatatgcgcctgagtccgttgaccatatgacaacgcaggcataaaagatatacaaaagcccgtttgtttcaatgtttctgatttcaataaaataatgaaaacacagtccgatatataccgtcgcgagaacgataaacccgacttcgtcaaacgtaaaggtgtttttcacgagcaccgtatagctgagcagaatcaatacggcgaaaatcgttacttccattttcgcatcgaaaaaatgatatttgtccggcatcatatacagccataacaacaagaagctgatcagacccggaaaagaaaaaaatctgagctttttcatccgcaaaagctcaaaaagcgctatacttcccatcacgtaaacaaatacggtgaacggcaatcctccgaaaataaccaaaaataaaaatagtgccgctgccagaacacctgttaacagtctttgtttcatttccaccatcctctaaattccgccaaacctccggccccgctgctgaaattctcccactgcctgcagaaagtgatcttctttaaaatcgggccacaggacatctgtaaaaacaaattcactgtaagccacctgccaaagcataaagttgctcagtctgatttctccgctcgttctgatgagcagttccgggtcctggattgattctgtcattaaatgcccggaaaagagcgcttcatcaatgtcttcgatattcagcgtgccgcttttcacctgttcggccaatgcttttgccgcattgacgatttccgtgcgtccgccgtagttcaaagcgaaattgagaatcagcccgtcattttgttctgtatcttttacggccttctcaatcgccctgtacgtatgagaagggagcgcggattcatctccgataattttcacctgtacattttcctctatcaattcaggaagatacgtattcaggaactcttccggaagcttcatcaaaaagtcgacttccatcttcggtcgcttccaattctccgttgaaaacgcataaagagtcagaactttaacgccgagctgatttgcgagctttgtcaccctttttaccactttcattccttcatgatgtccggcaatccgcgggagtgagcgcttcttcgcccagcgtccgtttccgtccataataatggcaatgtgtgcgggaatttcacccttcagtatgtcttcttttgtataccgttctaagttggaagccgcattctgctgattcttccaatttttgagtatgttgagcatgagattcctccgtcacccaaaaaggttgcgttgctgatgatcaatgtaatcaacagtattaacaaaaaaaccccctgtaaacatgagagggtcttttcacattatctattgtacatagtttttcattaaacttccatgatttctttttctttgtctttcgtgacgctgtcaatttttgacacatattcatctgtcagcttttgaacgtcttcactggaagcacgaagctcgtcttctgtaatgtccccgtttttctcaagttttttgaggtcgtcgttgctgtcacggcggacattacggactgctactttcgcttcttccgcgtattttttcacgactttgacaagttctttacgtctttcttccgtcagagccgggatcgcgatgcgaataattgtgccgtcacttgtcggagttacgccaaggtcagctttcaggatcgctttttcaatatcgccgattgccgttttgtcatacggtgtgacaacaagcatacgcgcttcaggcacattgatggaagacagctggtttaaaggtgtttgggcaccgtagtattctactgtcactttatccaatagagatgggttggcacgtcccgcgcggactgacgccaattcacgtgaataagcggcaaccgctttttccatgcgttcttttgtttgtgttaatacttcgtttgacaacgttatttcccccttacgatcgttccgattgattcgccgattacggcacgcttaatatttccttcttccataatagaaaagacgatcagcggaatatcattatccatacatagtgaagaagccgtagaatccatgacttccagcccgtcttttaacacatcgagataagataatttttcgtatttaacagctgactcatcttttctcggatcggcattatacacaccgtcgacattatttttcgccattaaaatcacatccgcttcgatttcagcggcacgcagcgctgcggttgtgtccgtagagaaataagggtttcccgttcccgcggcaaaaatcacaacgcgttttttctccaggtggcggatggcttttcttctgatataaggctcagcgacctgacgcatttcaattgatgtctgcactctggactgaattccgagcgtttccaggctgtcctgcagggcaagtgagttcatgacagtagcaagcatgcccatataatcggccgtcgcacggtccattcctaagtcactgcctgtttttccgcgccataagttgccgccgcctacaactacggccacttcgacgtcaagctcagcgatttcttttacctgtttagcgatggattggataacagtcggattaatgccgtttccctgctctcctgccaatgcttctccgctaagctttaaaacgatacgattgtattttggtttttccataataacctccaagtgtaaacattgccgtttcctattatgcaagagaaaaaaaggtttgtaaatatagttttaaaaatagggaacacaagtagtgtcccctatactgcctgaaaagccgcgaaagattcgccaaggctttccgccattattttttcacttggttcataacttcttcagcaaagttttcttggcgtttttcaatgccttctccaacttcgtagcggacgtaagttttaacagatgcgtttttcgcagccacaacttgtttcactttttcgtctgggtttttaacgaaagcttggtctaataagcaaatttcttcgaagaatttgttcagacggccttcaaccattttagctacgatgttttccggtttgccttcttgaagagcttgctgagtcaggatctgacgctcatggtttgcttcttcttcagacacttggtcgcgggaaatataacgaggatttaccgctgcaacatgcatcgcgatgtcttttgcaagatcttcgtcagttgttccgctaagaacggataatacgccgatgcggcctcccatgtgaaggtaagcaccgaacgcttcgctgtcttcttttgtaagaacagcaaaacggcgaagagtgattttctctccgattttagcaacattgcttgtgatgtattcttcaacagtagaaccgttttccatcttttgacccaacgcttcttcaagatcagcaggagcgtttgcaagaaggtggtcagcaagcgtgttcagaagctctttgaagccttcgtttttcgcaacgaaatcagtttcagagtttacttctaagataacgcctttgttgccgtcagttttaataagagtagaaccttcagcagcgatacggtcagcttttttagccgctttcgcaattcctttttctctcagaaggtcgattgctttgtccatatctccgtcagtttcagtcaatgcttttttacagtccatcataccagcgcctgttttttgacgcagttcttttacctgctgtgcagtaatagccatttgaattcctccttatatgtgtaaacaagatatgtatagatacatttttcttgaaaaaaggtgataaaaggcagtccctcttatcaccttttgattaggttacgcagttgtcgtttctgtttcaggtgcagtctcttcagcagcttccgcttcttcttcgccttgcttcgcttcaagaatggcatctgccattttagaagtaagaagtttgacagcgcggattgcgtcatcgtttgcagggattacgacatcaatttcatcaggatcacagtttgtatctacgattccgatgataggaatgttcaatttgcgagcttccgcaacagcgatgcgctctttgcgaggatcgatgatgaataatgcatcaggaagatccttcatgtctttaattccgccgaggaatttttcaagacgctctaattcttttttcaattgaacaacttcttttttcggaagtacttcaaatgtaccgttttcttgcattttctcgatgtctttcagacgcttaatgcgtttttggattgtttcgaagtttgtcagtgtaccgcccaaccagcgttggttgacatagtacatgccagagcgtacagcttcttctttaacagaatcctgagcttgtttttttgtgccgacgaaaaggatttttccgccttcagcagcaaggtttttcgtgaagttgtaagcttcctctacttttttcactgttttttgaaggtcaatgatgtagattccgttacgctccgtgaaaatgtaacgcttcatttttgggttccagcggcgtgtttggtggccgaagtgaacaccagcttcaagcaattgtttcatagaaataactgacatgtgatttcctcctaataaaatggtttttttcctccgcttaggtcatttttgtgcagaactgccgtttgcagcaccctctgcataaatcgttaagcgtgtgtatttaacaccaagacataatataacacagctttatgcgacaatcaagaatcctttacagctttgccgcgaaattttaaaaacagctcgatttctgtctttccgctctgcacccgtttggcgatttccgcaggggtgagcccttgttcatataattctgaaacacgttcttcaaacgaatgcgcaccgttgttttcgtcactttcagcccgttccgttgcactgatgagcttttccatgtgatccggaatatcaggctcttttttcggttccggccggggttcggcgtcttctgcgtcaggcgcttgatcattccggctttttgtgtcttcgagtctttcattttcttctttcagctcaagcagaaacgctgcaagggtgttttccgtctcttcaagaatcttcttctgctggcgctccgtctccttgagggctgaaaacctcgtgtacagaataatgacggcataaagcagtacgccgtgaagcacaaagcttaaaagccataatagtgttgacatgtttttcactcgctaaccatgagttcattattgaattactttttcaagcaggtgctttaatttaaacagcgcctttgaatgaatctgtgaaatccgcgacgtcgaaaggttcaggacttgtccgatttcggtcaaagtcagttcttctttatagaataaactgacgacaagctgctctttttcagagagctcgtgaattttgcccgcaagctgagcgatcagctcgtccttcatgattttttcttccggcggcacatttttgtcatctctgatcatcacttgaatattctcaccgtcatcctggtcgtgaagcttttcatcaattgataagagattggcaaaaaacccttcattcatcgttgatactacgtcctgctccgtcatcccaagctcttctgcgatctctgaaggcgtcacattccgaaggtagcgctgttcaagtttttcgattgccgcttcgactttttttgtcttctcccgtgaagttctgggcagccaatcttctttacgcagcccgtcgatgattgcaccgcgaattctaaacgaggcataggtatcaaattttaaatcccggccggggtcaaatttttctagggcatcatataaaccaagcataccaaggctcattagatcgtctttatgcaccgatttcggcagtccgacggaaattctgccgacatgatatgtgaccaaaggcatgtaacggcgcattaaatcatcaccggctttaggatctttccactctttccagcgcgaccaaagcacctgatcttcataattcaaggattgcattgttatccccctacctcatacctttattaaatcgttgtttcaccttgtttaacagttcgaatgtgcagcatgcaggactttggctcaaattcaatcgtccggccgcttgagccgcccgtatcttcactgatgaccggaatgttatacaatgaaagctgctctttgatagccgctacattcctcggaccgattttcatcaggtcgtttgtcattttaaacttaaacatctccgctcccccggcgagttttgccttcagggcaaacttgcggcagccggctttcaaaagcatatcaattgtcatcttaacggcggtgtccgcgtattttgcacggttgagctccgccgtttttgataaaccggagtccggcagcatgacgtgaacgagtcctgccgtttgtttgtctttatcgtataaaaccagccccacgcatgaaccgagtcccgaagtccggattttatccggataacgcgcgacttgaacatccgcaatccccactttaacgactgcggcttccgcacggctcataaagccgcacccaatgagacgaagagcttttcaaaagaatcatagtccgggagcataaacatatgggctttgagctcctgccggctgccctggtcaaaaatagaagtatccacgacaatggcatgctctccgacttggctgagctccatcagtccttcactgataaccgcgccgaacatatcaagtgagatttccggcacgctcgggtaaatctcaagctttgtcaaatcagccaatgccgttaaataggaacctgctaaaatattgccgaactcatgtaaagcagaagaactcaaatgatcttcgcccaactggtcaatatcaaaatccggatttccgatcagctctctgataaactgttccgcctgatggaaaggcatgatgagaaagatagagcctgtcatgtcgccttccattcttaaaaagatactggcgaccggcgtttcagccccgccgaaaaaatcagcgagctcatcaaatgtcaataaagtcgcaaacggcacttccatgtctatctttctgttcagcagctgagccatggcagaagccgagtgacccgccccgatatttccgacttcccgcaaaatatccatctgctcttctttgatcgcttcaaacttactcatgttgtcttttcccctttaagcattcggctctccggacgcagatgccgaagcacctttatccagcaccgcatgcgcatcaataatattgaggagcctgttatcttgcttgacgatctgtttaatccacacatccgtttcctttgtctggctttcaggcgcggattcgatttcattttcatgcacggtgatgacgtcattggcctcatccacgacccatccgacatcggcgtcacggtaagaaatgatgataatccgtgtctcttctgtgatgtcctgttcaggctggttcagacgttttcttaaatcaagaaccggggtaattactccgcgcagattgataacgccgcggatatacgattccacacccgggaccctcgtcggtttttgccacttttcaattgatttcacctgggaaactgagatagcgtattctttcccgtttatcataaacacaatcattttttcacctgttttgatttcagcagtcatgcgggcacctcctcgtgtcgttttagtagatcagcgcattgcaatcaataatcagcgccacttctccgtttccgagaatcgtagcgccggaaatcgcaaagacgttcgtcaaatagtcgccgagtgatttcagtacgacttcctgctgtccgataaaagagtccacgacaaaagcagtggatttatcgccctttttcacgacgattacatggaactgatcggcatcctgttttgaatctgtaatgccgaattcttttttgagatagacgatcggaacgatttgtcctctgaaatcaatcacttctctgtcatgcgtctgcaggatatctttcttatcaataacagccgtctctataatagaagaaatcggtatcgcaaacgtctcttcttccagtttaatgagaagaacggatataattgaaagtgtcagcggaagctggatactgaaaagagaaccttggccttccgcggatttgacactgacagagccgccgagtgattcgagtttattttttacgacatccagaccgacgccccgacctgaaatgtcagaaatttgatcggcagtcgagaagccaggagcaaaaataagctcgtaaatctcattatcttcaagcgtttcagcatcacgttcggtaattacactccgctcgagcgctttttcaagaattttctttctgttcaggccggccccgtcatcttcaacttcaataaagacatgattgccgctgtgatatgccttaagcacgacatgacccgattccggttttcctttattcacccgcacttcaggcgattcaatgccgtgatcgatgctgtttctgattaaatggacaagcggatcgccgatttcatcaatcaccgtgcggtccagctccgtttcagctccgatgatggacaattcgattttcttgtttaattccttttgaagctggcggatcattctcgggaaacggttaaagacggtttctaccggcaccatccgcatattaagaataatagactgaaggtcgcccgaaattctggtcaggcgttcaacggtttcagtcagctcattgtggtcaagctctttggcgatctgctcaagacgtccgcggtcaatgacaagttcttcaaaaaggttcattgaagaatccagtctttcaatgttgacgcgaatcgttttcgagccgctgtgatgcttcggctgctcttccgttttcgcttgcggtttcggctgtttttcagcctttttaaccggagtttccttcaccggttcagctgcttgcggtttttcggccgtttttaacggcgcaccggcagaaatttcgacattctccacttctgaaatgccgctgatgagttctttaatttcttcagcaggctgctttgtcaagaaacacacctgaaaatccgttccgaaatcttccgtctcaagcacttccgcggcgggtatcgtttttgcaacttccccggcttcattcagcttttcaaatatcatgtacacgcgcacggctttgagcatgcagctttcattcagggaaaccgttatttcatagcggctgaatccttgctcttccgcctcttcaataacagtccgttcgaactcatcataattccattcagttgaagtctgttgttttgaagccggcggttctgctgtttcggctgaagccgcagtctcatgcgccgcatttacgtcgagcttcgcacttacttcagaaatatcacgtttgccgtctcctccgtcaataatggactgcaccatctcttcaagatgatcaagcgcttcaaacagcacgtccagccaatccgatgtaacgggcatttctccgttgcggatggcgtccagcacattttccatcaggtgggttaaatgcgccagatctgtatatcccatcgttgcgctcatgcctttcagcgtatgggcagctctgaagatgtcatgcacaagctgaaggtctgccggatctttttccaacagcagcagcttttcgttacatgtctgtaagtgctctttactttcatcaataaagacatctaaatattgattcatatccaattgattcacaccctctcttttttcacacatccggtgatggatgccgcgatatcttccacatgtttaatctcatgaatgaggcccgcctttatcgctgacttcggcattccaaacacaacacaggattcgtccgattccgcaatcgttttaacgccgcctgttctgagcatttcttttacgccctcggttccgtcgctgcccatgcctgtcataatgacggctaccttttcgtaaccggataaacggcttgccgaccgaaacaaataatcggctgacggtttatgccggctttccgtatcatgaacatcaagaatgatgcggagccttccgccttcctctgcaaccgtcatattttttccgccgggcgcgatgtacacccatccgtctttcgcttcttcaccgttttccgcttctttgacctgaatatctgacaaatggttgagtctgtctgcaagtgaagcggtgaagccttcaggcatgtgctgaacgacaaatacaggcgcctttaaatccttcggcagtttcggaaccaccttttgcagagcccgcggtccgcctgtagaggtcgcgatgaatacggcctgcttggcggattttgctttcggtctttcaaatcccgccaaagccggacgttccgggatagaagactctttcactgccgcctcaggtttttgtgcgcgggacatcccggctgcaatcaccctctcaatcagctgctctttaattttataaagatcaagtgaaatcgctccggaaggcttagtgataaaatcaaaagcgcccatttccaggcagttgatcgttcggtccttcccttgctgtgtctggctcgataccatgatgacgggaagtttatatatgctgatgatcttccgcaatgtatccgttccgttcatgaccggcatttcaatatcaagcgtgacaacatccggtttgagaagctctattttcttcagcgcctcttccccgtttctggctgtcccgatgacttctatctgcacttccgcagccagaaaatcggtaatcatctttctcataaaagctgagtcatcaacgacaagcacacgaatcactgtaaagtcctcctcaataaaaaagaagataatctctcaataaatgccggtttctcttctcttggtttgttttcttccgtttgaaacaagacatccgtcagaagacggacggacctgctggcttttgcttgaggactttttattaaaaaaggcacctggtcaatgacggcttgacttactagcggatcatcgggtatggagccggcgaaacgcacctccgcgcctaaaaacgtgtggatcgcatgagaaaggcggttgtacgtgtccagcgcctgtttttgagcgcgggcgcgattgacggcaatgtttacggtcagccgttcatccgcgagcaaaagatgtttgatcgcgctgtacgcatccataatggccgtcggctcaggcgttgtcacggcgagaatgtcttccgccgataaaataaacggcagctgttcttttgaaagtcccgctcccatatcaaacagaacgtaatcaaaatcgcttaatacagcggaaagaccattcataaaagccgaccacttctctctgtctgcttgatagaacgcctcaagccccgttcctccggatatgtagcgaaggcctttcggaccggaggaaagtgattgagccaacgcgtgccgattctccatcacatcaataatggtgcgggaagaagcagctccgatcagcacatcaatgttgcccattccgatgtcaagatcaatgatgagtgctttttttcctttttcctgcagggcaactgccatgtttaatgttaaattagattttccgacgccgcctttaccgcttatgacggctaatgtcctcgcttttttctcataaagctccggcttgatcatttgcctctctctcattttccttcttaatgactctgcctgatcgggtttcatgccaaaagcatccttacaaactcttttggtgaagccgataggatgtcttcaggcacatcctgtccatttgtcaaataggcggcgccgattcttgattccgacagcacttgaaacacggagccgagtgaggcggtttcatccgttttcgtgaaaatgaattgattgaccggcacaccggaaaactgtttcagcacctgtttcatatcttcatattttgcagatgccgataatacgagaaaggattgtaagcctgattcaaacggaatcatctcttgtaattccgtaatatactgctcttctttaaagtttctgccggctgtatcaatgaaaacatggtcgtattcagcgaatttttccagtgccttcagacattcttcctttgaatagcatacttcaagaggagcctgaagcagctccgcatatgtcttcagctgctcgaccgcggcaatccggtaagtatccgtcgtcataaaggcaatttttttatgctctgtcagcattgatgaggccgcaagtttcgcaagtgtagtcgttttgccggccccggttgaaccgaaaagcacgacgtattttgattgaatcccttcctgccacctgtctgtcgaagggagttttttcactaacaaatcctgcagctttgagctgacattatcttcagttaaatctccggaaacaattgaagaactgagcaattcactgagtacagcgttttgcgtatgatcaggaagcccggcttgcttcaatagtctctcggctttttttaatggttcagggagcacttctttcaaatgcgccagttcgccggaaatactttgatccggaaggcgcggcggctgaacaggctcagctttctccgccgtttccgtctttttcatttcttcagcggcagccggcggcgtttttctcgcttccctgacgtcacgatctaaaaccgctatcacttcgacggcctgctgcgaccgcagccccagccattttcgtttctttacttgtttggaatgtaaaataacggcatcattgccgagttcctttttgatttgcttcgcggcatcctgcattgaagcggctgtaaatttttttattttcattaaatatccaccactccaatgctctgtacttcaacatttgcttccagctcattataagaaagaaccggaagatcagggaaataccgttctaacagctgttttacatacattctgacagcaggcgagcaaagaagaatcgccgactcctgacggatggaaagctgctcggcctctttagcgacagaacggatgatgctgtccgaaacctcagggtcgagtgacaggtaattgccctgttcagtctgctgaaccccgtctgcaatcgctttttccacccggcctgagcatgtgatgaccttcagcgtttcatgctctctcgcatattgtgccgtgatttgtttggcaagcgactgtctcgcgtattctgtcaaaaggtctgaatctgtcgttaatcttccgtaatcggcaagagtttcaaaaatggtcaccaagtttctgattgaaactttttctctcagcaatttggcaagcaccttttgaatatcgccgacagaaagagggttcggcgtgacttcctcgacaagcacaggataattttccttcagatgatcgatcagctgctttgtttcctgtctgccgaccagttcatgagcatgctgcttaattttttctgtaatatgcgtagatacgactgacgccggatcaacaactgtataccccagcatgtccgcttcatcttttgcagcttcgctgatccattttgcgggaagtccgaacgacggttcaatcgtttcaattccttcaatgacgtcatcttcaggcgtcggtgacatcgctaaataatgatccagcaggagctctcctttagcgacttcattgcctttaattttcaatctgtattcattcggctggagtgcgatgttatccctgatgcgcacaaccggaatgacaagtcccaattcaagcgcaagctgacgtctgatcatgacgatgcggtcaagaagatcaccgccctgccccgcgtctgcaagcggcacgagtccgtatccgaactcaaattcaatcggatcaatatgtaaaagctgcacaacgctttccgggcttttcagttcatccgcctgagcctcttcttcaagaatttcttcctcttcttcgctcggcttatccgctttggacagcatataagcgccgaatgcaagcagaccggcgatcggccccgtcagcagaatgccgatcggtgtaagaagaccgagcaaaagtacagttcccgcggctacatacaagagcttcggataagcaaacagctggcctgtaatatcatgaccgaggtttccttcagatgccgctctcgtcacgacaatccccgtagccgttgaaatgagcaaggccggcatttgagaaacgataccgtcaccgaccgtcagcattgtaaagtgagacgcagcttcttgtatgctcatcccctgctgcagcatgccgattacgattccgaaaataatattgatcatcacgatgatgatccccgcgatggcatcccctttaacgaatttgctcgcaccgtccatggcgccgtaaaaatccgcttcccgggcgactttttcacgtctgtgctttgcatcctgctccgtaatcatgccggcatttaaatccgcgtctatactcatttgctttccgggcatcgcatcgagcgtaaatctcgccgccacttccgatacccgctcggcgccttttgtaatgacgataaactgaataataattaagataatgaagacaacaagccctaccagcacatttccgccgacaacgaaattcccgaatgtctcaacaacctttcccccttctccgtgagaaagaatcgaacgtgtcgtcgacacattgagcgcaagccgaaacagcgtcaataacagcagcaatgacgggaatatcgagaattgcagcggttcttgcatattcattgtggtgagaagcacgatcaacgcaagagagatattaatgatgatcaaaatacttaacaaccatggagggaatggaatcaccagcattgccacaatgaggacaacacttattaaaaccgataaatctcttgttgacatgctgtttttctctccttttgaatctgaaattcgctatactttttgtttcgttttatatacataagccaaaatttccgcaatgactttgaaaaactcttccggcacagcctggtcaatgtcaacctgatcatataacgcacgcgcgagcggcctgttttcaatcgtcatgacatcgtgttctttggcgatctgcctgatttttaatgcaagatggtcgacccctttggcaacaatgtaaggggcggccattttcttttcatcatattttaaagcaatcgcataatgggtcgggttggtaatgatgacatccgctttcggcacttcctgcatcatccgcctcatcgccatttcccgctgcttctgcttaattttggacttgataatcggatcaccctccgattttttgtattcatcttttatatcctgctttgacattctgatatttttctcatagtcaaaacgctgatataaataatcaagcccggccagcagcattagagcccctgatcccgcaagccccatccaaagcgtgagcttagaaacgaaagtgagcacttccgcaggtgttaaaagcggaaggcggagaatatcgccataatgcagccagagcaccataaaggcggcaaaaccgaccacagtaatcttcaaaatggatttgaccagttcaacaatcgccctcatgctgtaaatccgcttaaatcctttcagcgggctgagcttattcaagtcaggcttgagaacttccgcagaaaacagaaaacccacctgcatgtaattgctcacgacacctgccacaagcgcgaccagcataatcggcgcgaggatgaggctgatatctttcaccgtatctacgaacagttcatgcacggaagatgctgacagatgtaatgatatcgatttcgtataaaacgttttaataaaggacagcagcctgtcccgcatataaggaccgagcgcgatcagcgaaagaaagataatcagtaaagaaacggctgtattcacatccgtacttttcgcgacctgtcctttctttcttgtatccttccgttttttcggagtggctttctccgttttttcaccggcaaagaattgcagattcagtctgagtctcatcatgtcacaccgaccaatgccaatagattccgcatggtttcaacggtaaggctgaagatgttgcggacgacgacaaacatcaccgccatacaaacgatcagcataataaagctcacggctattttcagaggaagcccgacaacgaaaacattcagctgcggcaccgttctcgccacaataccgagcgccaaatcaactaaaaacagactggccacaaccggcgcagacatttgaaaagcgataatgaacatggcattgaagctttttgcgataaaaagtccaaagtgatcatttccaaacgacggaaatgcctgatcaagcgggatatactgaaagctgtaataaatcccgtccaataaaagataatgggcgtttacgctgagcataaataacagcgccagcgtataaacgaattgtccgatcagcgggctttgcgttcctgattgcggatcaatgacattggcgatggaaaagcccatctgaaaatcaataaaggaacccgctatctgaatggctgtcatcatcatgaaagcaatcagcccgaggctcaagcccacaacggcctcttttatgacaagcagcatatactgttcccctatttctatttccggcgcatgtttcagcgtgctgaagcagatcaccgaaagaaaaaaagcaaagccgattcggtgaaccgccggcagattccgatgtccgaacaccggcaccgttacaaaaaaagcagagattctgataaagaccaataaaaaagcgggaaataaatcaatgatggaattcatttgattctaccctgcaaatcggttcagatgagagaacagatcagttgtgaacgaaagaatcgtcgacagcatccaaggaccgaaaaagatcagtccaagcatcaccgccacgattttcggaatgaacgcaagcgtctgttcctggatttgagttgtcgcttgaaagatactgacgagcaaaccgacgatcagcgcgatggcaagcagcggcccgctgatcattagtgttacatatacggctttttccgccatggaaattacaaattctgaactcacaattagcacctaccctaaaagctgtcaagcaaagatttcacgattaaataccatccatcgaccaaaacgaaaagcaatattttaaagggcagagagatcataaccggcggtagcatcatcattcccattgacattaagacgctcgccacgaccatatcgataattaaaaacggaataaaaatcataaagcccatttgaaaagcggttttgagttctgatatcgcataagcaggcaccatcgtcgtcaaaggaatatcctgaatcgattcaggttttttcattttggcatagttcataaacagcgccagatccttctgccttgtatgcttgctcatatactctttaatcggcttctcggcttttgtatatgcttcatcgagactgattttgttgtccatcagcggcgttaaggcttccttattaatctctgaaaaagtcggcgccataataaaaaacgtcaagaacagcgcaaggccgattaaaacctggttcggaggcatgttctgcgtcgccagtgaggttctcacaaaagacagaacgatgacgattctcgtaaagcaggtcatcaaaatcagaatccccggcgctactgaaaagacagtcaaaagcagcagtaatttaacagtggagctgacttcggtcggattgcttgaattaaaaagattaacgaattcattcatgatgataagggcctttcttctttccttcagaacggctttgtttcagctcgttcagctgttctttcagcgcttttgaaaacgacggaagcatcgtttgcggctttttttctccatccttacgcggatttacgagcttggtccattccacttttgaagacatcgactcttcgtattggctcagaatcgcctcgcgctctttttcatcttctatttcttttaaaagctgtatcgtttcgcccacaccgactacgagaacgctgtttcccactttaatcagctgcacggaacgattttggccgactgacgttccgccgatattttctacatattgaaacggcttcagcagacggtttcttctattcatcagtttgacaaatccatagatcagcagaatgacgaataataacgccccgatcatctttacaaaatcaaaagcggagacagaagatgcagaagcatcccctatctcttgatcagccgtttgtttcgatgtatcgctttttttctctgttttgtttgttgattgtttgtcaaaccattcgttgacggtggaattatcagactctgccgcaaaagcagggaacggatgtacattgagtaaaacgaaataacaaatcaaagctagtaaaccatgactctttttcaacagtcgtacaccctttagcttaatgttttattaatggcttcaagcacgcggtccgcttggaacggtttcacgataaagtcttttgcgccggcctgaatcgcgtcaataaccattgactgctggcccatagccgaacacatgatgattttcgcctgcggatcgatctgtttaatttcctttagagctgtaatcccgtccatttcaggcattgtaatatccattgtcactaggtcgggggaatgctctttgaatttttcgactgcctgcgctccgtctgaagcttcagctacaacgtcaaaaccgttcttcactaaaatatccttgatcatcattctcataaatgctgcatcgtctacaattaaaattctgtgtgccataatctgtttctctcctctatgttcgcttattttaaattgttaaggcggtctgcctgacttaaaatatcagtgactctcacgccgaagttttcttctatgacaacgacctcgccctttgccacgatccgctggttgaccaggatgtccacaggttcaccagccagcttgtcaagctcaataatgcttcccgcagaaagttcaaggatttctttgacgcttctcttcgttctgccgagctcaaccgtaacggaaagcggaatatccatcagcatatcaaggttattccttgatccttgcgccgcttcgttatgatcaaacgcctggaattctaccggagcgacttgaacaggagcagctttttttgcggttccctgtctcttcggaagctcgggttttgcctgcggctccggctgcatggcaggttccggctgcggcgtttcgtatgtttcctgtggttctgatgcggtttctgcggcctctgactcatgctggtccgcagtcatcaggtctgcgatcagatctttcgcaaacgtaatcggataaagctgcatgatgctcgaatcgattaattcgccgactttcagacggaatgacacttttacgagcaggtcatcctcaggtattctgtcggtccctttttcttccgtcacatccagaagttcaacccttggcggagaaatgtcaatctttttactgaatacggtcgacattgacgtagcagccgagcccatcatttgattcattgcttcctgcacggcgctcaggtggatttcaccgagtgacggatcggcgccccggccgtctccgccgatcatcaaatccgcgatgattgccgcgtcgctttgttcgacgacgagcaaattgctgccgtcaaagccttctgtgtagttcacttcaatggcaacatacggatgaggaaattcatcactgattttgctttttgaaatgacggtcacactcggtgtcgtaatgtccactttttgatttaaaagagtggacagcgccgtagccgagctgccgaacgaaatattcccgatttctccgatcgcatcgcgctcaagttcagacaagttcgcctcttgaggctgttctgtatcctctgactgactgcttgtgccgttaagaagagcatcgatttcatcttgagataatctattgttcatcttgttcacctcttatgtcgtgatctaaaatttgcactgcctgtcttcgattcacccggccggcctgccctaaaaacttcggtttgtttccgaccaatacagtaagaggatcagtcactgatttgtccagagttatacagtccccgacttccaaacttaaaaattcttctattgtcagttcagaagcgcccaagagagccacaacgggaatttgagccgtcatgatgcgcttttcaagcagcttcgtttcttcgggcttcgcttcattccggtctgattgcatccaataatgtacggaaagcttagggataatcggctcaagtacgacatggggaatacaaagattaatgacaccgctgatttcacctatctgtgtattgagagaaatgacaacgactgtttcatttggggaaaccatctgtacaaactgaggattcacttcaaattcagtcatttcagggtcaatatcagcaatcgattgccaagcttctttgtagttgcccagtgcattttcaaataagttagaaataatattcgtttcaatttccgtaaggctgtcagctttgttatgagtgatgccgatgcctcccatgacgcggtcaagcattgcgtatgcgatggtgggattaacctccatcatgattctgccttccatcggatgaacatcgaataaatttaaaatcgtcatgttcggtatggaacggataaattcttcatacggcacctggtcaactgagctgacggatatatgaatatacgttctgagcttggcggaaaagtgtgttgtgagaagcctcgcaaagttatcatgtatccgggttaaactgcgtatctgatctttcgagaatctgagagcccgtttaaaatcatatacctttacttttttctctttaacttcctttttcagctcttccgcatccgcctcacccgtggaaatggcggaaagcagtgcgtctatttcattttgggagagaacttctcctgacattttcttcacctccgtattctgtcaaatttgtttttattgcagattaaaggaggtaatgtacactttctgaacttttccttcttggagatagctgtttactttctcttttaatgattgtttaaacgcttctcttcctttatctccctcaatctctccggcgcttgtgtcagctaaaatggaaatgatgttgtctttcacctgaaaatcgcgtttttcaagttcttccttcgctttagccgagtcggtttcaagcttgatgccgatacggatgatgctgtcagactttaagtttgtcgtgatatcgtcgacagacacagtggctgcaacgacttcgtcaattgtcggctttttatctttgccggaatgtccgctgacgacaaaatatgctgccgttccgaggccggcgatgacaattaaaataatcagcaaaatgatgactaattttttcttcattcttcttcctctattccctgatccagtgaaaatatttgtatgctatggtaaaacgatatgacttttttgagaactgcttcttccggttctttcacaacgaactttttgccgttggacagtgtaatcgtcgtgtcggggaagcactcaatctgttcgataaacagcgcgttcagcgtaaaaggctggccgtttaaacgggtgacttgaatcatgcaatccggagaagcggcctaaccgcctctcctccctccttaccgtttcagattaaccagctcctgaaggatttcatctgaagtcgtaatgatttttgagtttgattggaaaccgcgctgagcaacgatcatttcggtaaattcatctgtcagatctacgtttgacatttcaagatagcctgccaaaagcttacccgttccgttttcgcccggagtggtgactgcgctcgcagctccggaacttaatgattctctgtaaaggttgcctccgattttttccagaccggcgctgttagggaacgtgaccagaccgatttgtccggcatcatgaaccgcatcccctgcatcagtgtatgtaacggttccgtctgcaccgatgctgtaatctttcgcatcagtcggaatattgattttgccgccgccgattttttcaaggtagtacccgtcagtcgtaacaaggttgccttgattgtcctttccgaaattccccgcacgtgtgtaaacgattcccgaacctgtattaatctgaaagtagccgtctccgtcaatggctaggtcggttttattctgtgtagcctgcggggcgccggttgaatgaacgacatcaatggaagaagtcgcggcacccaggccgatttgttttgaattggtcacgtttgaaccgccggcgactgtctggctgatcatatctttaaatgtaacgcggcttttcttaaatcccactgtgttgacgttggcgatgttattgccgattacatctagttttgtctgaaagtttttcatgccgctgataccggaatataatgaacgtaacatgttaaattccccctgggtttctttttatttagatgtttcgctgacggccgtgacattccacggactgacctctttgccattttcaagcacgagcacgtaattgccgtttgaatgcttgactgaattgactgggcttgtctgatccttcccgtcgctgtcgctgaatgtgacatttttgccgatccagttcacatacatcgtaaacggatcttgattttctacaaatttagtcatcgtcgtattcatattcatcatttgttccaatgaagaaaatgtcgccatctggctgatgaattctttgtcatcaaccggattgagcgggtcctggttttgaacctgtgtcattaagatcttcagaaattcgtctttccctaaattcgtactgctgtttactgcggaggtgctcttcgcgtttgaagtggttgaagcgcccgccgcggcataatccgagtttactgatgtcacctattcttcctccatttcattgagagaaagctcctccagcatatctccgaaatcgcctgactgctgcttgttcttctgctctctctgtccctgatgctgctgtttattgtgatcggccgtctgcccgtaaacaggctgctgatccccgccttgaagcgggactgtaaaacggtcgacctggaccgacatattcggaagcgactgtttcagctgaggaagatgctgttccagcagctctttcgcggactggctggatgcgattattttgctttgaaacatcccgttttcgtttgtcaccttaattgtgacaaatccgaggttctcgggattaagacgaatcgtaaagcttccggttgttttcccgaaaggcgtgtatttcatctgtttccagccgctgatgacctgatccgttaacggtttattttctgccggctgctgttcagctcctgcggacgcttgctgaatgccggcaaggcttctcgttcccgaaaacagtatatgtgcagacaatttgctgtcaggcgcctttgcgtgagaaaccgtgccgccgttttgctgttccgttttcccggctgactcttgggatgattcagatgattgagataacacaaaagctttcagctcagtttcagccatatcccattcctttgttcccttttgagaaaggcccgcaagctgctccgcgacgctttgaaagctcttcagctcagcggctgtcatggagtaaagtttagatgcagattcgtttttcggaaaaaatgtctgccgcaggtcttgaatcacgcggtccggaacaccttgttttttcaatgcctctaataaacgggcgccttcctggtaaaccgcctttgcctgcgtgctgtccggcagttcctgctgagatgtgaagagctggaatacggcttcttgaatgaaaagcaggcccttctcaagcgcatccttgacggaatccccgtcttttgcggaagaatccggctcattcgtttcaggcttcgccccatgctgttttcccgctaacatgtcttcaacggattcggcaagctgtttcaataaaggaagagctgtttcagccgtctgctttccttcaagagcttttaccgcctcaagcagctgtttaagctgcaattctttatcttccgggccggctttcagccaatcaccgattttcgatagggcatcattcagctctgcgtcacttgtttttgtttcatctccgggctgccggggagaagtgatttccgacaggagccagttctgaaatagacctaagctgtttacattcatcttcacattgctgttttgcgcagtctgcgtacgattacccgttaattcaagcagcttcaacttacatcactccttatttccgtcagcggatagtttttctgtatatttagccgcttgttcaggagtcattttcgtcaagatttcagcaagctgctttttacttaatccgtttaaaatatcgagggcttctttttctttcagctttacgataatgcttgccgctttaccgctgtccatacttttatagatgttgatcattttatcttttccggctgaatccgaagcgtcttttttcgtttcatccgtcttcgttttctgctgctgttcagcttcctgtttcagcgaacggattttctgattcagattatcgatttcggacttgcttgtatctaaatctttattcaaaatgttaatttcacttttttgttcctttatggtcttttcaagagaagccgttctgtcttccttctgcttttccgccgcgcttttcatttctttcgtttcgggaaccaattcttttaaaacaggcgttttagcggctgtttcctgaatcggcttcatcacatcaacgccggcagcccaaaggatgatgcttgcgacgatgatcagaaaaatcagcgggatcatgataaaaagcaggattgaaccgaactttccagatctcttttctttttcggccatttcattcgctcctaatgcccctgaatcataaactgcttgattgaaatgtcatccatttccctcatctctgcagctttgtcttcaagtgcgaacatattaaattgtttttcccgcattttttcaaatttctttacttcaatgtttttttcggtgagctgttcctgcttctcattcatttcatttcgtttcatgatgacaagcttttgataatgatagatggtgttctcaagattggaaacgaattgctgataatgtctcatttcctgaacgctcatcccgcatttcagctttgattctttgtctttttcgagcaattcttttttgctcatattttcatatagtttttcagccactgtctcaaattcagaaaccgattgtctgtattcagtcaatgtttggtctttttcattttcttttaattccagcagcttttgaaatctgaattggtacgccatgatgtttattcctcttttcctgtcagactcgtcaatgccgcaatgctgtcttccaattgagcaggttcttccgttccttgttttaaaaattgaataagctgcggataaaactgaatcgcttcatcaatttctcttgatgaccctcttttgtaagctccgatattaatgagatcttcagagttttgataagttgacagaagatcgcggaatttgttggccgcctctatgtgcgctgtgtctgaaatattagacatgaccctgctgatgcttttcaggatgttcacggccgggaactgtcctttgttggcaagcgcccgatcgagaacgatatgcccgtctaatattccgcgcaccgtatcggcaatcggttcgttcatgtcatctccgtcaacgagaaccgtataaaaagcggttatcgttccttgttcatttgcgcccgttctttccagcaaacggggcaaaatagcgaacacagaaggtgtatatccctttgttgtcggcggttctcccgctgccaggccgatttcccgctgagccatcgcgaccctcgtgacggagtccatcatgaacatcacattccggcctttatcgcggaaatactccgcaatggcggtggccgtatacgccgctttcaatcgcattaacgcaggctgatcagaggtcgcgactacgactatcgagcgtttcaggccttcttcgcctaaatccttctcgatgaattcacgcacctcgcgcccccgttcaccgacaagtgcgataatgtttaaatcagcttcagtctgcttcgcaatcattcccatcaaggtgctttttccgactccgcttccggcaaaaatcccgattctctgcccttttcctaccgtcagcagactgtcaatcgatctgacgccgacacccatcttttcccgtatcggcgggcgtttcatcgggtttggcggcggctgttccgtcgaaacgggggacaaacctttcggaagcgcccggccgtcaagaggttcgccgaacgcgtcgacaacttgtccgattaaacccgcccctactttgatgcggagcgactcgccagtggcctccacaatgctgcccggcgctatgctggccgcttccagataaggcattagcagaatgttttcatcctggaagcctacaacctcagctttaatcgcttttttcgcatggcctttcggataaatgagacaaacatctccgattgagctttcgggcccttttgattcaatcatcagcccgatgacccgtttaaccttgccgtagcgtttgtacggatccgctgtttcaattgagtctattaaatactgtgtcttcattgctccgctcccgcctcaagcgccgttaaaagcttttgctttaattgcatcagctgagtgtctatgcctgcatcaacacgtccgaacggagtttctatcgagcacgttcccttcgcggctttttcatcggcatataagcttaatctgcattctttgtataacagctgctgaatttcgtccatatgctgatgaaccgtctcataatattcagggtccacatagatggagatgtcatcataatcttttacttcggctactacctgtttgaccagcagaaggaaagcctctttatcgtcacttttttgccgccatacttttttagcgagcgcaacagaaagctcaataatttcttcctcagcgctttccagtttttcctcgactgattgtctggccatttccataacggcattggcccggctgatgagattggcatattctgcttgagcatcggcttttcccaatgccatgccttctttatatccttctgccttcgcttcttcaatcaatctttgtttttcttccgcccagcggtttttctcttcttcaatctgccgaagagtgtgatccaattgacttttcgcttcttcagacaccctgtcggcttcggccttggcaaaggccatgagtgcctccggattttcaggttcctcccggtctggctgggaatgtgttttcctgacttcctgcaaggatagcttgcgccgtttttgttcaggagaaaatgatgtttgctgtttaatgatattagacaataatatcgtctcctccgcctcgcgcgattacaatttctccggcttcttccagcttgcggacgacgcccacgattcttgattgcgcctcttccacatcacgcaaacgcacaggccccataatttccatttcctctttaaatgtttcaaccatacgctgtgacatattgctgaagacaatctctttgacttcctcgctcgcaaccttcaatgaaagcaggaggtcgtcgttttcaacatctctgatcacgcgctgaatcgcacggttatcaagggtgacaatatcttcaaagacaaacatccgttttttgatttcatccgccaattcaggatcttggatttctaatgaatcaaggatcgttttttccgttcctctgtctacgccgtttaacacttcaacaacggcttctatgccgccggtctgcgtataatcctgcgtaaaggaggaggacagcttttgttcaaggacccgctccacttcatttatgatttcaggagacgttctgtccataaccgcaatccttcttgccacctcagcctgaacgtccgggttcagctcagacaaaatctgtccggcctgcaccgggtcaaggtaggataaaatcagcgccatcgtttgcggatgttcctgctgaatgaaatttaaaatctgttcgggctccgcttttctcgcaaaatcaaacggctttacctgcaaagaagaggtgagcctgtttaaaatgcttaccgctttgtcttctccgagcgctttttcaagcacttggcgggcgtaatttaaaccgccttgtgaaatatagtcctgagcgattgcgatattatgaaattcttcaatgatttcatcttttctttgatgatcgacgcttctgactcccgaaatctcgagagtcaacctttcaatttcttcttcagacaaatgcttgtacacagaagctgatacatcaaggcctaaggaaatcatgaggatggctgctttttgttttcctgtaagcttgttctgatcacgtttcgccattttccattccccctaatcctcgtccagccagcttcgaagcaatttagcaaagtcttccggtttttctttagccattttttcaagctgttttcgtctgactgtttcttccgtttcaattttctcttcgttgatatcaggcaatcgaaccggctccggcggtgtttcatattcatattcttcgtattcatcctcttgtgagcgtttctttctgatgaggagaatgataagcagaataatggccgcaagcagtacgccgcctgtaatatatacccagatcggaagacctgaagattgtgccgaatctgtgttcaggcttgtttttccgtcaaacggctgaacggatacaacgattttattgttgatatcattgtctgtcaggttttgattttgcgtttcgtttttatcaagagacgttctgacgaccgttcctaaaatcttctgtatatcagcctgtctctgtgccgataaggaagcggcatttttcggattaggcggctccaccatgacctgaatgcctaaatcacgcactttatacgggctttccgcgatttctttatgaatgcggttgacttcatagttgattttattgctgcttttttcgtagtccccgctgtttgaaccgccgtttgtctcggcatagttcgcggtgtcattgcttcccgttccggccgtgccgccgttggccgcgccatcgcctttatacgtttccgcgactttttcggcgcttaccgctatgccttccatgttatctttatcgacaggttcgacagtgtcttcagtgcgtttttccttcgtgaagtcaatatccgccgttacagaaacaacgaccttatcctgccccatcattgtgccgagcagtgactgaacatgtttttgaatgtccttttcgacctgcgacttaataccttgctgagatgcataactgtcagaaacggaccctgcaccgctgtcacttttgtcataatatgtagaattttgatccattatgacgatattatcttcttttaagttcggaacacttttagaaacgagatggtacagcccgttgatctggttttgatcaagcgagtagcccggtttcatctgcaaaacgatggatgcggacgctgccggctgatcttcaccgacgaacacggcttctttcggcatattgatcatgaccttcgagcttttaataccgtccatttcatttatcaggtttgacaattcggtctgagtcgcctcaacctttaaaacgtcaaactcattatctgtcaggccgaagcccgcattttgtccgaaaaacgaataatcaattgatcccgttttcggcaggccttccgcggcaagctggactttaagcgaatccacttggctctcaggaacctttatgaccgtgccgccgtcagcaagttcagaagacacctttttcgtatcgagctcttctttaatcttccccgcttcttccgcggacaaatctttataaagaggcaccatcttttcagacgaagtaaaaataataacgacgatgagtaaaataatgaatgcggccaagccgcttaccatgagtatcttctgtgtttttgatctgttgttccaaaacgctgccgttttggttttcatttgcattagagtacgattcatgttaacccccggtcattccagtcattctcttcaatctgaccactacatctgcattctcatgatttcctgataggcttccacggctttattgcggaattcggtagcggccgtcagagaaatatttgctttttgggcagcgatcatgacctcgtcaaggtttacatcctttcctgcagccagttcgttcgttatttggtcagattttacttgtgactcatttaacgaatcaatagagttttttaaaagctccgaaaagcttgtttggtttgaagaatcagttttttgagtttggtttaattgattcgttacgttttgagtgttttgggtttgttgaagctgaaaaggagtaatagcgttaaccacttacatcaccttactttccgatttctaaagcctttaaaagcatgcctttggaggcgtttaatgcagttacgtttgcttcatatgatctcgtgctgctgacaagatccaccatttcttttaatgggtctacatttggtttttgtacatatccgtctttattcgcatcaggattctccggatcataaacgagattaaaagcggacgggtcttccgtaacgccagatacctttacgccatttcccgcgcttcctgttccgttcatcttggaatgtaaaagggacgaaaatgattcgcctccggattggagagataccagctttcttctgtaaggcacccattcgccatttacctgcttcgctctcgttgtgtccatattggccaggttggacgatacgacgtccatccggacacgctgtgcagttaaagcggaacccgaaatatttaagctttgaaagccactcattattttcctcctgtcaagacggttttcagagaattgaatttgccgctcattctttcaaccaaagcctgataattaatttggttttcggctaaatctgtcatttctttgtcgatatcgacattgtttccgttttgctggtacgatgtatcactgctggacacgatagaataatcgtcccttgaacccgtaaagtcaacgtgccgatagtcggtttttaccgcctcaagattggatgtttcctgatctaacaaatttcggaaagagactttttttgccttatagttcggtgtatctatattggcgatgttattagttaagactttttgcttaatgtccgctctccccaaggcattctcaagattttgtatagttccagaaaataagtccaaatccacttacctccatttcagatatttttctcctaaaaatccttgtcgagaattgtaaaaccatatgcttattgtaagaaataacaggcttaaagtctatgaagttaggctaaaaaaaagtgctcaattatatctattttgcatgtaggtattaagtcctagagtatttggactacaagtatttgtttaatataagactgaaaatagcagaatttctgtatcttcctccttttttcacacagcaagatggattatctcagatcagcttccaataagcaactttaaactgcaacttttcacctattgtccataaaaaaagcaggacccccattttcagggatcctgcttttgtcttaatgagatttaaggttttccaattcaataaggaatttgttgttcagaactttaatgtacgtccccttcatacccagagatctggattcaatgacgcctgcgctttccagctttctcagcgcgttaacgattactgaacgcgtaatgccgacacggtctgcaatcttacttgccacgagcaagccttcgtttccgtcaagctcttcaaagatatgctcaatcgcttcaagttcactgtaagacagagaactgatcgccatttgaacaaccgctttgcttcgcgcctcttcttcgatttcttccgctttttctcttaaaatctccattcctacaacggttgctccgtattcagcaagaatgagatcatcatcttcaaattgatcctgcagacgggacagaatcagcgtgcccagtctctctcctccgccgatgatcggcacgatcgttgttaagcccgcttggaacaggtctctgttttccacaggaaatgccgtgtattcgctgttgatatcaaggtttgaagacgtctccggaacattgaacagatttctcgtgtactcttccgggaactggcggtcttcaagcatttttttcatgcggtcattttcaatctgctgattaatagagtagcccaaaagctttcctctgcggctgacgacgaaaatattagaatcaatgacgtcacgaagcgtttcagccatttctttaaagtttacgggtttgcctgccgcagcctgcagcatgctgttaataattcgtgttttttgtagtaaagccatgataaataatcctcctagaattcctcttattaaattttcacaatataaattgacttagatctttgttgtttgcaatcgttccgagcttttcttcaacatattgcggcgtgatggcgactttttccatcgtcacgtccggcgcttcaaacgacaggtcttccaagagacgttccaatatcgtgtgaagccttctcgctccgatgttgtccgtatcctgattcacatgataagccacttcggcgatcttacgaatagcttcgtcagaaaattcaagagatataccttctgtctgcaataaagcctgatattgttttaacagcgcgttatcgggttcgacgagaatcttcacaaaatcatccaccgtcagcttgctcaattctacacgaatcggaaagcggccctgcagctccggaatcagatcagacggtttggccatatggaatgccccggctgcgataaacagcacgtgatctgttttgacggagccgtatttcgtgacgacggtagatccttcgacaatcggaaggatatctctttgaacgccttctctcgatacatctgctgaggaagaagcccctccgttttttgcaattttatctatttcgtcaataaagataatgccgccctcttcagctcttaacacggcctcttggccgacttcatccatatcgattaatttgcctgcctcttcattggtcagaaccttccttgcttctctgaccgtcattttgcggcgttttttcttttttggcatcagattgctcagcgcatcctgcatattcatgcccatctgctccatcccggagccttgcagcatgtcaaacatcgacggctgctgctcttccacctctacggagacgtaatggtcttcgagctctcccaatgcgagctgatgcgccatgcgttttcttttttcttcaaggcttgcttcttcctgctgatcggcttcatcatcatttgccgtctgacttcctccgaaaagcatttcaaacggatttttcacacccgcttgttttttctttcccggaacgagaagccgcacgatacgtttgtttgcattttcttcagcctgttctttcacttcgctgattttttcttctttaatgagccgcacggatgtctcaacgaggtctctgaccattgattcgacatctctgcctacatagccgacttctgtaaattttgtcgcttcaatttttataaatggcgcaccggtaagcttggcgatccgtctggcgatctctgttttccccaccccggtcgggcccatcatcaggatgtttttgggaacgatctcgtctctcagtttttcatcaagaagacttctgcgatagcggtttcttaatgccacggcgacagcttttttcgcatcctgctgtcctacaatgtattgatccaaccgatctacgatttgtctcggtgttaacggtttgttttccatgcgcctcaagtcctttctattcaagttcttccaaaatgatctgatcgtttgtgtacacacaaatctcgcctgcgattttcaaagcggcttttgcaatatctttggcggacagattctctccggcataggttttcagcgctcttcctgctgacagggcgtagtttccgccggagccgattgccaaaattccgtcatccggctcaatcacttcacctgttcccgatacgagaagcaaggtatcctggttcatgacaatcagcatggcttccagcttgcgcagcactttatcgctgcgccattctttcgcaagctcaaccgacgcacgttttaaattgccgttgtattcttcaagcttcgcctcaaacatttcaaaaagtgtgaaagcgtctgcaacagatcccgcaaatccggccagaacctttccgttaaacagctttctcacttttctcgcggtatgtttcatgactacagcctgaccgaatgtgacctggccgtctcctgacatagcgcttttcccgttatgctggacggcaaaaatcgttgtcgcatgaaaagatgacatgagaagggcctccttttaattttctttaaaagctctcgggtggtgggacatatatgtgtttctcagcatttccttcgatacatgcgtgtatatctgcgtagaagacagattggaatggcccaaaagctcctggacgcttcttaaatcagccccttcattcagcagatgagtcgcaaacgtgtgccgaagcatatgcgggtgtatatgtaaagtgccggatgctttttttacaagcccgcttaaaatataccggattcctctggcggtcagcgggccgcctctttgattgacaaacagcacatcatgaggctcttttgctttttcaagcaggcactgccttccgctgttgatatacagctccagcgcatcacgggcatatgagccgaacgggatatagcgctgcttcttgcctttcccgtgaacgagcaccgtatccatgaacaggtcaagatcgccgacagtgagcgtacagcactcactgaccctcattccggtcgcataaagaagctcaagcagggcctgatcgcgcatccctgacggctgacttctgtctgagacagcgaatagttcctcaagttctttttcataaagaaacttcggaatccgtttctcttgtttcggcagatgaacaagctgaaacggattctcttcaacaagcttttccctcattaaaaatttatagaagcttctcaaagctgaaattttcttgctgattgttcttcttgacaggcctttttcataagcctctgtcaaaaatattctcacatcatgatatgcagcttctttcattccatttatattttgagcatgcagaaacatcccaaattcttcaatcgaattaacataattcacaatagtatattgtgaataatttttttcaatttgtaaatattcaacgaataactttaaaaaaaagttaacattctcagtcattatgaagacctccctctccgaagggcttttaaatggtatcatataatgcatcgaagttgcaatgaaaagctatatcgttttcgaaatagtttgaatagtctcaattgcgcgtttagcgtattcttcatttcgttcttttttgtttttaatttttacaggcaattcttttaagaggccgaagtttgcattcatcggctggaagttcttctgatttgtcgtcgtaatgtagtgagccatgcttccgatcgccgtctcctgcgggaatgtcacaagatcctgaccgagcacaagtttggcggcattgattcccgctacaagacctgaagcggcagattcaacataaccctctacaccggtcatttggcccgcgaaaaacagatcgttccgctgtttaaattgatatgtcgggttcaaaaggctcggcgagttgataaatgtgtttctgtgcatgacgccgtatctgacgatatcaacattttcaaggccggggatcagtttcagcacttctttttgatctccccattttaaatgtgtctgaaaacctacaatattataaagcgttcccgccgcgtcatcctgtctgagctgaacgactgcataagggcgcttgcctgttttcggatcttccagtccgaccggtttcatcggtccgaacagcatcgttttcttgcctcttttcgccatgacttcaatcggcatgcagccttcaaagaagatttctttctcgaattcttttaaaggaaccgtctcagccgtcgtcaatgcttcatagaaacggtcaaactcttcctctgtcatcgggcagtttaagtatgccgcttctcccttgtcataacgggattttaagtacactttatccatatcaaggctgtctttttcgacaatcggcgccgccgcgtcataaaaatacagatactcttctcccgtgagctctttcagctgctgtgaaagcgattctgatgtaagcggtccggtcgcgataaccgtcgggccttccggaatctctgttacttcctcagtaagaaccgttacgttcggatggtttttcacgagatccgtcacgctttgcgcaaattcatggcggtcaacggcaagcgctccccctgccggaaccgagcatttatcagcagattgaatgattgctgagtcaagcgcccgcatttcttcttttaatacgcctaccgcattggcgagtgtatttgaacggagggagttgctgcataccagttcagcgaatttatcagtatgatgggctgccgtctgcctgacgggccgcatttcgtatagttttacttgaattcctcgttttgcaagctgccatgccgcttcacttccggcaaggcctgctccgattacattaactgtttgctggttcatttcttttcatctcctgttgtttgtcccttccacacaaagaaggtgagcaaggctctgctcaccgctacttctgtggttcttccttataatcgcattcgacgcattggacttgtatgccttttttaagctttttctctacgagcatattttcacatttcgggcattttcgttcaatcggtttgtcccaagatacgaagtcgcattcaggataacggtcacagccgtaaaagacgcgtttcttttttgattttcgttcgacaatatttccttcatggcacttaggacattttacgccgatttgtttaacaatcggttttgtattccggcagtcagggaagttggaacacgccataaatttaccgtatcggcccattttataaaccatccgggagccgcataattcacaatcttcatctgcgtattcaggttcaatttccacttctttcatttcagcttccgcttttttcacgcgtttttcgaaatcggtatagaagctgtcaatgatttgaacccattctgtctcgccatcttcaacatggtcaaggtccctttccattttagccgtgaattcaacgttgatgatttccgggaaaaactccatgataagatccagcacgatctgcccaagctcagtcggcacaaaccgtttattgtctaatcccacgtaaccgcggcgctggatggtgtcaagagtcggcgcatatgtcgaaggacggccgatccccagttcttcaagcgttttaaccaggcgcgcctctgtgtaacgcggaggcggctgagtaaagtgctgctcaggctcaatatcttttgataaaaccgtgtctccctctttaaggtccggaagcatgcggtctttttcttccagctgatcgtctttaccctctacatagactttcatgaagccggcgaatttgactttacttccgtttgcccggaatgtcaatccgttattgctgagatcgacgctcatcgtatcaagtacggcaggcgccatctggcttgcaacaaaacgctcccaaatcagcttgtatagtctgagctggtctcttccaagcaccgcttttaagtcggcaggttttctgagcaccgaagtcgggcggatcgcttcgtgggcatcttgagcgttttcatttttctttgccggtttccgttttcccgctaagtactcttttccgtatgcctgatcaataaaagctgacgcctcttcaacggctgtattggaaatccgcgttgagtccgttctcatatacgtgatgagtccgactgtcccttctttgccgagatcaattccttcatataattgctgagcgatcatcatcgttttcttcgctctgaaattcagcttcctggcagcctcctgctgcagagttgacgttgtaaacggcagagcgggatttcgtttgcgctcttttttcgtcaccttgtcaactgtatacttattgcctttcagctgagcaaggacggcttttacgtcttcttcgctttttaaaggaagctttttgccgtttttcccgaaaaatccggcttcaaacgtctcttttccctttaaaaatgagccggtaatcgtccagtactcttcaggtttaaagtcattgatttccttttcccggtcgatgatcagccggagcgcaacggattgaacacggcccgcactgaggcctttttttacttttttccaaagaatcgggctgattttgtatccgacgagtctgtctagtatgcggcgcgcctgctgcgcatcgacaagatccatgttaatcatgcgcggatgtttaaatgattctttaatggcgtctttcgttatttcattaaagacgacccggcagtccgagctgagatccagatcaaggctgtgtgcgagatgccatgcaatcgcttctccttctctgtcggggtcggccgcgagatagactttttttgctttctttgccgctgtttttaattcttttaaaacagggccttttccgcggatcgtaatatatttcggttcaaagttctgttcgatgtcaactcccatttgacttttcggaagatcccggacatgtcccattgaagctttgactttatatttcttccctaaataacgttcaatcgttttcgcctttgccggcgattccacgatgactagataatcagacattttcatccccctcaagaggtgttctctctcttttcaagtatcaattcattttagagctgcctttttatggctttcaacatttcattctttatgatgaacgtcattttatacatgaaaataatatgcaactttaaatcctcactattattaaatattacaataccgtttgtcaaacgatatttcaaaagggttccgtatactgaacgcatcgggcggtcagctctccgtcaatatcctctgcgcataatacagctttcgccccttcttgaatgagttttataggtcctccggaatatggattaaatatggaacccggaacggcaaatacctctctgccttgatcgagggcctggtaagctgtgattaatgaaccgcttttttcttttccctgcacgaccacaattccttcacttagtccgctgattatgcggtttctcatcggaaagtgccattttttcggctttgtttcaggaggatgttctgagagtaggagatggtgttcagccatgtattctgctaacaggagattttcccggggatagatgtgatggaatccgccggctatcacgccgatcgtaagcccttttgccctgatgctcgccttatgagacaaaccgtctataccggatgcaagcccgcttacaatgacccagcctttttttgagagttcggcggaaagatgcccagccgcttttattccgtcttccgtcggtttccgcgttcctacaatcccgatttttctgcctttttcaagaagcggtgtgttcccttttgcatacaagacagccggcggatcataaatcgctttaagccatgttgggtagcagcttgatgaaatcggaataacagtaatgccttcgcggcggtaatcggacagaacttcatcaagttccggatccttgcgctctatttcccgaaaaattgcttccggggctgttttcccctctgataaaacagttaatggatgcggatccgaaaaaaaagacagagagtgatcagctttccaccattttaatagaagagacggggaaatgatttgattaatactgcagaccattaaacagcgcgatgcttgatccaaatctggcaacctcctcttttttcagcaaaaacaggaacagccgttacggctgcccctgcttcgatcagtgcgttttgcacgtttcaaataagcctttttcttttaacaccttaatcagcgtttcacccattacagaaggggtttccgcgacttcaattccgcaggcgttcatcgttttgactttttcttctgccgtgccttttcctccggagatgatggcgcccgcatggcccatgcgttttcccggaggcgcggttttaccgccgataaagccgacaacaggcttcgtcatgttcgctttcacccactcagccgcttcttcttcagctgtgccgccgatttctccgatcatgatgacggcatgtgtttcaggatcttcattgaacgcttttaacacgtcaataaagttcgtgccgttgaccggatcgccgccgattcctacagcggtagactggcctacgccggcttctgaaagctgatggacggcctcgtatgtcaatgttcctgaacgggatacaacgcctacatgaccctttttatgaatgtatcccggcataatgccgatcttgcattcttcaggtgtaataacacccgggcagttcggccctattaatctcgttttcttgccttccataaagcgcttcactttcaccatgtccaaaaccggaatgtgctcagtgatacaaatgacaagatcaatttccgcgtcaaccgcttccataattgcgtccgccgcaaacggagccggcacgtaaatgactgacgcatcagcgcccgttgtatgaaccgcttctgcgaccgtattgaataccggtacgccttccgcttccgttccgccttttccaggtgttacaccgccaacgatattcgtgccgtattccagcatctgctttgtatgaaataaagcggtagaacctgtaatcccctgtacaataactcttgtatctttattgataaaaacactcattatctggtcccctgcctttcattctttcctaaactaaggatacgattttctgtgcgccgtctgccattgattccgcagatgtgatgtttaagcctgattcattcaggattttctttcctaaatctacgtttgtcccttcaaggcgcacgaccagcggcaatgtcaatccgacttgtctcgtcgcttcaacaacgccctcggcgatgacatcacacttcatgatgcctccgaaaatattaacgaaaattccttttacgttttgatcggaaagaatgattttaaaagcttccgtcactttttctgcggttgcgccgcccccgacatcaaggaagtttgcaggttctccgccgtagtgtttaatgatatccattgtagacattgcaagacccgcgccgtttaccatacagccgatatttccatcaagggaaatgtagcttaaatcgtattttgacgcttcgatttctttcggatcttcttcatctaaatctctgtattccataatgtctttttgtctgtataacgcattgctgtcgaagttcagcttagcatccagcgccatgacgtttccgtcccccgtaacgacgagagggttgatctcggcgatggagcagtccttctcaacaaatgctttatataaaccgagcataaatttagcggctttgccgacaagctctttcgggatgttaattgcgaatgcaatttcccttgcctgatagccctgaaggccgacagccggatcaattaccgcttttttaattttttcaggtgttttttccgctacttcttcaatctccgttccgccttcttcagacgccattaaaacgattcttgaagtagcgcggtcaagtacaagcccgacatagtattcctttttaatatcgcagccttcttcaataagtaagcgttttattacttgtccgtccggacccgtttgatgtgtgacgagcgtcttgcctaacagttcttcggcatactctttcacttcatcttttgtttttgcaatctttaccccaccagctttgccgcggccgccagcatggatttgcgcctttacgacataaaccgagcttgacaggctctctgctttttcaactgcttcctctgctgtaaaagccactttaccttcaggaacagacaccccgtattttctgaggacttcttttccctggtactcatggatattcatttcccatcctcctaacttatgtagcaaaactaaaaatagactgcgctttcattctatataatactggaagaattgtctagggttcaaaacaaaatctttatatccttccaaacattctaacttttattttattgaaaatataaatttaaacggagtccgggaaatgaatggtccttatttttcgtttttcagggttttgtccagtctgtaaacaaatgaaaaaatttcggcaacggtttcatagagcgcctccggtatgtgatcgtcaaccgtcaaatggcgcattaattcgacaagggttctgtcttcctgaatggggaccccagccttctcagcttcttttataatattttccgccacgtgccccctgcctgttgcgacaaccttcggggcttggtctttctgccggtcgtaatgcagggcgacagctcttcttaacggcgtttgctctttcatattttcacatccacttttcttccgccgtctttttctataaactcttccacaagagcgctctggtctttcgggcgccgttttttagacgtgacgcctgacaggctgaagcccgtttcttttacggcttcttttaaagccggtacgagagggtcgatggccgcctgaagctcaaaatcagtctcaaccgtaatggtcattacattttgctgaatcacgcagtccacaacggtttcttgcagtgtttcaagatgcagcaaaaacaggagcctgcaatgtgacggatcgagttttccgtccggcttcttccgtcctttaaagagaactgtgatgtcattctcatacgcggacgctcccagcggaaatgacagcaccatctgcgtaaaagaagggttatgctgctcaataaacagctggccgtttaatttatgaataagcggttccgcctcttgtttaacggattggggcgcttcttgaagcgtccggacggcttggagggccgttttcagcgcttgtttctccggctgcggagatacgcctttttcaagcgctgtaatgaatgataattcatcacgcgtgcccaatccttttttgattttctgcaaaaggcttaatacatcatgtttttccgcatatttcaattcggtgagctgaacggctttttcgaaaacagccgcctcctgttctgtcagatgtgctttttgaagaacaggtgctgttttaaatgttttttcttgagaaatgaaagccttaatgatctccgccgttacttttacggggcggttttcagttttttctgccgatgtcattaatttctctataatctgttttgccgttttttcaggaagtttttgatctgtccgcgcactcggaggagaaggttggcttgagactgcctttccgttttcacgagtctctcggacaaatggtgattgttttgattccgtccgttcttcttcatccatcagcccggtttctgggatcggcatgcgtgcagcctcggcaagcttcttcaagagacgttctgcatgaagatccgtttccgcgtttaatacgtcagaaaccgcctctttgagcacagacagctcttttgccgattgcggtgcctgattgattgcctgaagcagtcctgagaggaggcgccgggtcggaaccggatatttaacggcatgaatggctgacaagacttccggatgtgcgggcagttcccgtttcagcgcaaatacgattgtttccgccgcttttttcaattcggcggccggaagcgattcagcccagcggacgcaggctttgaggctgttttccgtcatcggcagcttctgctgcataaacgtttcggcaatctgcagagacacagggcccggtttgacggaaagagcgtttaacagtctacccgccgcttcctgaacggttttcgggcttccttcgaattggtcgatgacatgaagccggcccgttttttccgccggctgtttgtcataagaaaaccagtaatacgcctgcggacgaagggcggtttcaagttttccctgcatcgtccggccgccgatctggataagagcgctttgatcgtccagcaaacggagaaccttccctaacagcagcctttgagtaccgctgtctttaccgccgtcctgccggtccggagggatttccgccgtcagctgtctgaaagccgcttggatttcgccgctaatgttcatgtcttaagcctcttttctaacaataagattgaacgggagcgaacgtttttcggtgaatagttgtcggtccgtatgcctgaagagcttcaagatgttctttcgttccgtagcctttatttttttcaaagccgtacatggggtaagttttggcgtactcagccatgagacggtcccgcgttacttttgctatgcaggctccggcggcaattgacacgcttttggcatccccttttataactgatgactgcggaatgtcaagcggaagggtcatggcatcaacaagcagataatcaggtgtttccgttaaagcattgacggcttttaccatcgccagtctcgcggcctcataaatgttgatccggtcaatgacgtccgcatggacaatgccgactcctacagccgccgcttcttccgtgatccggctgtaatactcctcgagcttcttttccgacaatttcttcgagtccgtgagaccgagaatctcgcattctgccggcaaaatgacggcgccggcgacaaccggtccggcaagcggccctcttccggcttcgtcaacacccgcaatcaggcggaagccctttttggatgacagtctttcgtatgccgtcatgtccagccattgctctttaagagctttttccttcgcatgctttttcagccattgctctaaaagcgtctgtacgctttttctcgggtctttctcacattgggcaaggaaggggtcgctttcgtccctgatctcttgcaggcgttcttttacgctttttacggttaatgtattcacgttctcttctcccttacattatgtatatcggtattctgcggaaaaaataaagacccgcatcgctgcgcgtctttattctgatggtgcttcaaatgaaagcctgccgaatttttccgtccggatgtcccgaatgataacttccgttgttttatcatagtcaaccattccgccgcccatcaaacagccgcgtttttcaccgatcgcgtcgaaaagagcggcgatatcctcagggatttcctgaagtccgtagcgctccttcaaacggtcgggataatgctcttccagaaagcgcagcccgaaaacagccacatcctgcaggttgataatcgtatctttaatcgccccggtgatcgccaggcgcaagccgacaagctcatcttcaaatttaggccataaaattcccggtgtatcgagcagctctaattccttgcctacctttacccactgctgtgaagtggtaatgccgggcctgtctcccgtcttggcaatgttttttttggccagccggttaatgagcgtagacttgccgacattcggaatgccgatgattaatgcgcggattgctctcggcctaacaccttttgctttcattttatcgaacttatccttcagcagctctttcgaggacggcacgatttgatgcagtccctgcccgttaacggagtttattgaaagagagggaatgccctgttcctgaaagtggtccttccactgggcagtcacagccgcatccgccttatcggctttatttaaaagcataatgcgcggcttattttttaaaatctcctcaatcatcggatttctcgatgacatcgggattctcgcatccaccaattcgtatacgatatcaattaatttcagtttttctgttacttcccgtctcgctttagccatatggcccgggaaccattgaatggtcatgtgacttcgacacctgccttatttaccggaaccggatgttccgatgatctcttatgtattttacgttgcttgttccgcttttacaaatttcatataaaaaaagagcctgttacgggtaacaagctcttttcgttcgttatcattatcgtctgatttctttaatacgagccgcttttccgcgaagttcacgcaggtagtaaagcttagcgcgacgtactttaccgtaacgtacaacttcgattttcgcgatttttggtgtgtgtacagggaatgtacgttcaacgccaacaccgtaagaaatcttacgaactgtgaacgtttcgctgattccaccaccacgacgcttgatcacaacaccttcgaagatctggatacgctcacggttaccctcaacaacttttacgtgtacacgtaaagtgtcaccaggacggaacgcaggaagatcagtgcgaagctgttcttttgtgatatcttgaattagtttttgcatcgttttcaactccttccaacagatgctcttggccacaactgcaaggcacagcggaacatcgttttcaagcttctgaaggataagcctccttaagccacaagtagtatcttatcatatcttcatcacctgcgcaatagaatctattcgttttcccactcggaaatccattttctttgctcatcagtgagaggatagttttcaagaagatccggacgtcttaaaaaggttcttctgattgattctttattgcgccattcttgtattttggcatggttgccggacaaaagggtctcaggcacttttaagcctttataatcggctggcctcgtatagtgaggatgctctaaaagccccgtgctgaaggaatcctccacgtgggatgcttcttttccgaggacgcccggcaaaagcctgacaacgctgtcggcaatcatcatggcagggagctctcccccggtcagcacaaaatccccgatggagatttcatcagtgacaagatgttcccggatccgttcatcatacccttcataatgcccgcaaataaacatgagatgttcctcttccgccagctcctcggctttcttctgcgtataacgctcaccttgcgggcagacgagaataatgcgcggcttggcgtccgtaccggctgtcagcttttcaaccgcatcaaatacgggctgcggctttaacaccatcccggctcccccgccgtacgggtaatcatcaaccgtttggtgtttattatccgaaaaagcccggaaattgatgacgtcaaaacggacagcctctttttcctgtgctttttgcagaatggatgagccgagcaccccttgaaacatttcgggaaacagtgttaaaaagtcgattttcattcgtctattaacccttccattacatgaatcttaattttcttctcatttatattaatatccttcaccacagaagctatatacggaatgagcgcatcttttttgccttttcttgcaaccacccatacgtcattagccccgggcgtcaagatttccttcactgtgccgatcagttccccgtcttctgacacaacctcgcagccgatgatttcatgaaaataaaattcatcttcttcaagctctcccaagtcttcttcaggaactttgatcaccatgtttcttaggtgttcgacttcattgagactcggcatttctttgaattgcagcaggtgaaactgcttgtgaagcctgtgggcgctgaccgttactttgattggctccgcagccccttccgcaaacaaatagagcgtattgccgggcttgtaccgttcttcggcaaagtccgttttagaaatgacccgcacttcgcctttaatgccgtgggtatttacaattttgcctacattaaaccatctgtttgtcatattatcacctcgggcggatttcaattactaccccgtcttttatgacgatggtatttgccgctgttttttcatgccagttatcaccgacgttgattgaaagcagcgcatcgatctccttttccttcacttcgcttccaagcgggagcgactctgtctggcttatttggaaatcaatcattttgattttatcttgtcttttttcaatggcttttttaaaagattccgctacatcgggattctgctgatctttttcatgttttctaagctgaaaatagagctggctgcattctcgttcaagcgtttgctttttttctgcaaaagaggccaaaagcttttccttgctttgctcggtcagaacctgcataacggttaccctgtgaataatctgcataggaccagactccccactcttccaacatatttctgttcatttgccttttttacgtgtaaaaaaaggggaggtgccggccctctccctttttcagtcaaatatttcaaattgaactttcttagaagactgtgcgccagctgcaaaaacgacggttcgaatcgctcttgcagtccggccttgctttccgataatcttaccggtatccgacttattgacagataagcgtagcgcaatcttttgatcagtctcttcctttgtgaccgttatgtcttccggatggtcgacaagcggagccacaatgctgacaatcaaatcttccaagttctgatcagtcattacttgccttgtttagcgttgtggaatttttccataattccttggcttgagaacaagttgcggactgtatcagaaggtttagctcctgtttgaagccatttaagagcaagctcttcattgattttcacttcagccggctttgcaaccgggttgtatgtgccgactgtttcgatgaaacggccgtcacgcggtgaacgagaatctgctacaacaatacgatagaaaggagatttttttgctcccatacgttttaaacgaatttttactgccattttactagcacctccgaaaatatttcaacaagatagtatattaacaatgataaaagtgtttgtaaagtgttttttcttaacaacggttttatcatgtataaccgattacataaaaggtaatttaaagccttttttcttcccttttgacatgttggtcatctgcttcatcatttttttcatttcctcaaactgctttaaaagacggttgacttcctgaacggatgttccgcttcctttggcaatccgcttccgccggctggcgttaataatatccggctgttctttttcaagaacagtcattgatttaatgatcgcttccacatgattcagctgtttttcatcgacttggatgttttttaagcctttcattttgcctgctccgggcatcatttgcagcagttcgtcaagaggccccatgtttcggacctggccgagctgctccagaaaatcatccaatgtgaagctcatcgttctcattttctgctcaagctctttggctttgtcttcatcaacggtcgcctgagctttttcaatcagcgtcagcacgtcacccattccgagaatccgggatgccatccgttcaggatggaacgcttcaagagcatcgagcttttctcccattccggcgaatttaatcggcgtttcggtgaccgcgcggatagaaagcgccgcacctccgcgggtatccccgtcaagctttgttaaaatgacgcccgttaaaccgagctggtcattaaagcttttggcgacgtttaccgcatcctgaccggtcattgagtcgacgacaaggaaaatttcctcaggatttgcgacttcctttacgccggagagctcatccatcagttcatgatcgatgtgcagccgtccggcggtatctaaaatcacataatcatgatgctcttccttcgctttttcaatcgcctgtctggcaatttccaccgggctgacctgatcgccaagcgaaaagaccggcatatcaagctgtttccccagtgtttccagctgtttaatcgcggcggggcggtaaatatccgcagccacgagcagcggtttgcggttatgttttttgcgcagcaggttggcaagcttccccgtggttgtcgttttaccggcaccttggagcccgaccatcataataacggtcggcgggcgtttggcggcggcaattttgctttcttcgccgcccatcagctcggtaagctcttcttttacgactttaataacctgctgaccgggtgtcagactctgcatgacgtcctgcccgacagcccgttcacttacttttttcacaaaatcctttacgactttaaagttaacgtcagcctcaagaagcgcaagacggacttcacgcatcatctcttttacgtcttgttcgctgacttttccttttccgcggatttttgaaatcgtcttttgcagtcggtcggctaatccttcaaatgccattgtttgccgcctcctaatctaatttctcaagcgcttcaatcagagccgtcattttttcctcttcctgcaagccggaagcaagctctttcagctttgtaaacatttctttacgctcctgaaactttttaaaaaggagcagtttttcttcatattgttcaagcatcgcttcagtccgtttgatgttatcgtaaacggcttgccttgaaacgtcatactcttcggctatttcaccaagggagaaatcgtccagataataaagcgacatatagctcttttgttttgacgtcagcaacgactgatagaagtcaaacaaatagttcattctcgtcgttttttcgagcgacatttgagctctcccctttgttaagtcaaatccctttacaaaaacttagtttacatggtttcagagcgtgtgtcaagtttttatcttgtcaaagcaggatgctctttttacataataagtgttttcaaaaaaattcatacagaccgtcgttaaaatactcgaattcttgttttgatacacgatagcggcaatagccttcgtaaaaagcattgagacatgattcatttgtgacaaaacgactgatcgctaatgattcatcataacgcggatctcccgccgatattcccgcagcatcgataaacagatagacctctccgtctctcaccagcacattatcagtcgtgcagtcaccgtgaatcattgtctgctgaacaggaacaggcctgtacctgtccaattccttcaaaagctctgcacttccttcagcttgtccttttttgacatattccccggctcgtttgatttgcagatcgagccagtctgtttccggctgtaaaccagagaccatttcggtttcatgcagccgctgcagaaactggccgaaacttttgatcagctttttcttttcagtatcccctttggcttttcttaaagccgaagtcagggtgattccatcctcaaatgacatgatgatatggctggcatgctgttcctgtatcatcccatagtaaataggaacaggcagacgacgagtttccgtcagttgttgtaaaacgaaggcttctctcattaaccattcccgatacttctgttgaaaagaacttttcagcaaaaatgcgtcttgaccggtcactatttttcgaacggttgaagtgcctccctgttcatccagcagcgacatatggtttatcgcgccgatcttactttccaattcagctttcagccatttgtccaacaactgccccctccattccgatctatcaatgcgtataaaaaaacgagtataaaaccgtccattttatactcgttttttattcattaatcttcggctttttcaactaaatccgaaaagagaccgtatacgtaagattctgcatcaaaccgctggagatcgtcaaccttttctccgaggccgaccagtttcacagggatgtgaagctcattgcggatcgccaggacgataccgccttttgcggtgccgtcaagcttcgttaatgcgatacccgtcacattcgtcgctttggagaattctttcgcctgcgccatcgcattctggcctgtcgtcgcgtccagcgcaaggagaacctcatgcggggcctcaggcacttcgcgttcaatgacgcgtttgaccttttcaagctctttcattaagttaactttattctgaaggcggccggccgtatcacaaatcagcacatccgctcctcttgctttagccgcgtgtacggcatcataaataaccgccgcagggtcgcttccggcagcctgcttaatgacaggcacgcctgtacgctccccccacacttcaagctgttcaatcgccccggctctgaaagtgtctccggcagcgagcacaacggatttgccttcattcttcagcttatgggcaagttttccgatcgttgtcgtttttccgacgccgtttaccccgacaagcagaataacgttcaggcgcccgtcctgaatatttaattcagaaatctgttcgtcgccgctgttataaatgtcgacaagcttttcagaaatgacggactgcacttcctgaggatcctgaatgtttttcagcttcacttcttttttgagctcatcaatcagctccatgacggttgtaaaacctacgtcagcgccaatcagcacttcctcaagctcctcgaagaaatcctcgtcgactttccggtagcgggagacgagttcgttcactttatttgagaaggaatttcttgttttttcaagaccatctttaaatttttcagagacggagtctgtctgtttcgtgattttctcttttaattttttaaaaaagctcatctttcaacctctttcctcgttactgaataaattcttttgtttcttccagtttgaccgaaaccattcgggaaacgccggattcctgcatcgtaacaccgtagaggacatccgcttcttccatggtgccttttctgtgggtgatgacgataaactggctgtcgccgctgtatttttttaaatattgcgcaaacctgaatacattggcttcatcaagcgcagcttccacttcatcaaggacgcagaacggcacgggccttactttcagaatagagaataaaagggcaatggcagtcagcgcccgttctccccctgacaaaagatttaagttttgcagttttttgcccggaggctgcgcgataatgtccaccccggaattaagaagatcattcggatcagtcagcttcagttcagcccgtcctcctccgaataaagaacggaacacgtcgttgaattgagaacggatctggataaacgtttcatggaatcgcttcgtcatttcagaatccatttcttcaatgacttgaaacagtgtgtttttcgcttccgtcaggtcatttttctgctctgttaaaaactgataccgttcgtttactctttcaaactcatcgatgctgccgagattgaccgttccgagctcttcaattgaaagcttgatcagtttgacccgttttctcgcctcttcaggctcgagttcaagctgatattgttcttttgccccttcaaaggataagctgtactcctcgcgtaaatactgcaagagattatcaagctcaacttccatccggccgagttttacctcttcatctttcagaatgtccgttttttgcttgtacagacgcttcatctctttcagctcaagctcgttcgtatcaagagcccgctggagcttcacacgctggtcgcgccggctggcgatcaattcgatcgttctcgttttatcgtgaagcttatgatgggctgcttcttcaagctgctcctcaccgcttgtgctggacgtcatctctgaggtcaggaggcttaaatcttcccgtgtttctttcagagcgagctgcgtttcttcaagctcttttttcagccttttgaggttgtcttcctcactcgagcacgcctgttcttttttcgcagcggccactttacattccgtcagttcatgagagagcgtttcttttgttgaggatagggtctgcttttgttttgtcagcctttccatctcttcctcaagctctttcagctggccggatgcctcactcagctgttcttccagagctgatttgcgcgtctctttttcccggctgctttccgtcagtgatgctttctcctggtcgtaaagctccagatgggtattgatgttcttttcagcaacttcgagttcatacagcctgccttttacatcctgctgctttgttctgaaagcctcaccgtcttcacggagaccgctcagcgtatgttcaagctcttgaatggcctgcttcagcgctttgacctctttttcgagcagagctgttttttcttccatttcggcaagccgcgcagtcaccgtctcaagctcgcggcttctgccgagcagagaattgtttttctttttgaccgcgccgcctgtcattgatccgcctggattgacgacatcgccctcaagcgtgacgatgcggtagcggtgcccgagaagcttggccagttcattcgcgccttttaaatcttcagtgatcagcacggtgccgagaaggttttgaatgacattccgatacgccgcatcatatgtgacaagcccgctcgctgtgccgaggaaagacggatgctttgaagccgtctgttcatcacgggtttgaagctggcgcggtttcataactgtaagcggcaggaacgtcgcgcggccgaaggaattctgttttaaatattgaatcgctttccgcgccgcctgctcatcgtctgtgacaacgtgctgcgccgctgcgccgagtgcaatctcaatcgccgtttcatatttttgttcggtcgcaatcagttcgagaacggcgccgcggatgccgccgagctgctctttctgcttcagcacttcttttacgccttggtaaaatcctgaaaaatcgccttgcatcgtttcaagcatatcttttttggatctggcctgctggacgaattgatatgcctgatacagcgctgattctttcttttcatactggcgttttttctgttcatatgctgtctggacttcgcgaaagcggacgacctgattgtgaatatcctcttcaacggcggccaattcctcttcgcacgccgctttgcggactgcaatatcgttacgttcttcaaggtatttttcattgtttgcggtcagtctcgcctgctggaccgcagattgggacatctgatcatctaaaagctgcagctcgttgcgaatcgacgcctggctgtttaacaattcaaagtaatcgctttttaattgttcgattttctcttctacattttcattatgcagactgagagcctgctgcttttctttcacctgggcgtttaaccgcttcacttccgcacgaagtttatcatagacggcagactgtttttcaatgtccgctttcagttcggcttctttgttcgtgtaatgtgtaacggattcctctagctgttcccggttttgcgcggcgttttttttgcgctctttcagcacttctttccggccttccagcttttccagctcttcacttgtcacgagcagcacctgctgcagttcgttgacggattcatcaagcgcgtggattttatctctcgtctcttctatcatcgcttcttttgcggacagagctgatgattccgccaattcttcttgttttgccgtctgcaccttttcttttaaacccgaccatctgctatgcagttgttcgatgtcaaaggcggtaagggcgatttcgacatgctcaagctctttctttttttctaagtagtctttggcgattgatgcctggattttcagcggttcgacctgatcttcaagctcgtggagaatatcttccaccctgtttaagttatcctgcgtctcaaacagtttgttttccgcttttttctttcgtgttttatatttcagcacgccggccgcttcttcaaaaatactgcggcggtcttccgctttgctgctgagaatctcttcgactttcccctggctgataatggagaacgcttcttttccgagcccggagtccataaataagtcaatgatgtctttcaggcggcactgctgattgttgatgagaaattcactttctccggaacggtacacccgcctcgtcacgctgacttcgtgataatcgatcgggagaaaatgatcttcattatcaagcgttaacgtgacttcggcaaggttcagccgcttgcgcgaatcacttcccgcaaaaatgatatcttccatttttccgccccgaagcgagcgggctgattgttcgccgagcacccagcggatggcttcggtaatgttgctctttccgctgccgttcggaccgacaacggccgtgacgccttttacaaagtcaacggatatccgttctgcaaatgatttaaatcctataacgtctaaacgtttgaggaacatcccagatcctccttatcgtataagtatctcaatattatcataatcacccgcttatatcaggcgcagacatactgaaatcccctagggatacagggggattttattgtttcgtatgatgtttttgcaattttgcaagagcttcctgtgccgcatgctgctcggcttcttttttggaacgtccgttcccgataccgagcgcctcacctttaagagagacgagcgcctcgaattcccggttgtgggcaggccctttttcattgagaattttgtactcaagcgatccttttccgtcccgctgtacaaattcttgaagctggcttttgaaatccatcacatgagaaaaagcaccatcgtttattttagggaacacgtactctttcaggaattgctgaaccggctcaaggccctgatccagatacagtgcgccgataaacgcttcaaacacatccgctaaaagcgcaggacgctttctgccgcccgtcatttcttctccttttcccaagagaacaagatcgccgaatgacaattcgtgggcaagtgagacgagtgacggctcgcatacgatagcggctctcagcttcgtcaaatctccttcactcatggccggatatttggcaaataagaattgggagatcgtcagttccaaaacagcgtcacctaaaaattcaagcctttcgttgtcttcatacggctttttccgatgctcattcacataagatgaatgtgtaaatgcttgatacaaaagtttctcgttttgaaaatgaaccgaaatccgttcttggaactctttaaattgctctatttttttatagaacttttttttatctttaaaatgtgagtgttttgacatagtaacctccataggcacatcaggttcaccgcgctccccgccgtaaacggaatcagcagcgcgtacagcgtcagacgccggtaaccgaacgattaaagggctaaagccccgctgtcaggcgggacttttagcatcagcttattgctggttttgtatgtagttcacagcgtcgccgactgttgcaatcttttcagcatcttcgtcagaaatctccatatcaaactcgtcttcaagttccataacaagctcaactacatctagggaatcagcacctaagtcttccttgaaagaagcttcaagtttgacgtcagcttcatcaacgccaaggcggtctacgatgattttcgttacacgctctaatgtatctgccatagcaattcacctcccctcaagtattatagaggattcgtttttaaaaaactagagaaactaggatgaaattttaaaaacaaatctttacatcaccattccgccgtcaatatgaagggtttggcccgtcatataacgcgatccttcagaagcaaggaacgtaacaacgctgctgatatcggaaggatcaccgaaacgcgcgagcggaatctgcttcagcatttcatcttggacttctttagaaagcttgtccgtcatatccgtggaaataaagcccggagcaatggcattgaccgtaatatttcggctcgcaagctctttggctgatgacttcgttaagccgattacaccggcttttgccgccacatagtttgcctggccggggtttccgctgacgccgacgattgatgatacgttgataatccggccggagcgctgtttcatcatctgtcttgtaacggctttcgtgcagttgaatacaccttttaagttaatgttaatgacatcatcccattcattttctttcattctcatcagaagattgtcttttgtgatccccgcattgttcacgagaatgtcgattgaagaaaatgcagcgacagcctctttcatcatgttttgtacttcttcggaatttgatacatcggcttttacggcgatcgcgtttcggcccaaagatttgatctcatctacgacttcgttcgctttcgcttcattcccggagtagttgactactacattacagccgtttttcgcaagatcaagcgcgatcgcccgaccgattccgcgggacgctcccgttaccactgctgttttttcattaagcatcctgattctcctccttcagcgtttgaatcgccagttcgatggtttcatggtcagaaaccgagattgttttaaggcggcggttcacttttttcacaaggcctgaaagcacttttccgggcccgatttcaacaaacgtcgtgacgccttcgtcaatcagtttgttaatggtttcttcaaagcgaacaggcgaatacagctgttcgatcagttttttcttgatatcgtctttttccgtcataacgtcagccgaaacgtttgaaatcacgggaacagccgcattttttaactcacaggcgctgagcacctcctcgagtttttgcgctgccggcttcattaattcagaatggaacggtccgcttacttctaatgggatcgcccgttttgctccgttgtttttcgcttcctctgaagccagctccacgccttttgccgttccggaaatgacgatctggccggggcagttcagatttgcaagctgtacgagatgaccgttttccgtcacttgatccgtcacctttttcaaggactccgcatccattccgagaatcgctgccatggcgccttctccggccggcacggcttcattcatgaattctccccgttttcttaccgtgtaaacggcatctttaaatgtcatcgctcccgccgcaacaagcgccgaatattctccgaggctgtggccggcggtgaaatcaggggtgatgccggattctttaaacttttccaatacggcgatgctcgttgtcaacagcgcaggctgcgcattgtatgtaagggtcaattcttcggcgtcaccttcaaaaatgagcgagctcagctttgtttcaagcgtttcatccgcttcatcaaaaatacgttttgacgcttcttcgcgttcgtacaggtcttttcccatgccgatatattgtgatccctgtccgggaaataaaaatgcaatcttactcatgatgcggtaacctccagactactcatctgttttttcttcttttacttcttcttctataaatgcggccacgttttggctgaccatttctctcgcctggcgcagcgcatggtaaacagcgcgtgcgtcagaagagccgtgcgctttaatgacgggcgctttcaaaccgaaaagactcgccccgccgtactcagaatagtccattttcagtttcatttccatcagcttcggctttagcacgcccgctgcaagcttagaaacaaaacttgaagtcagtgtatctttcagcattttgaaaatcgataacgctgaaccttccaatgttttcaacgtgacgttgcccgtaaagccgtctgtgacgatgacgtcagcagcgccttcgagcaagtctctcgcctcaacgtttccgacaaaattcacgtttgtttcttttaataattcaaacgtcttttttgtcaggtcgtttcctttcttttcttccgtgccgacatttaacaatccgacgcggggcgagctgattccgagaacctgccgggcataaacagatcccataattccgtactggacgagatgctccggtttggcatcgacattggctcccacgtccaaaagaaggaaaccgtcgcctgaaacggtcggaagcgtcggcgcaagcgcaggccggtcgattcctttaattctgccgacgataaacagtcccgctgtcatgagtgcgcccgtattccccgctgagatgcaggcgtccgctctgttttcagccacttcctgcgccatcagcaccatagaagagtttttctttctgcgtacggcgcggaccggttcatccgtcggttcaatcacttcatcggcgtgcaacacagtgatgcggtctgatgttgttggcaagtgtgattctatcgttgtcttgtcaccgaccagcgtaatatgaagatcgtcaaatgcctcaatactcttcattactccgtcaataacagctttgggtgcgttgtcgcctcccattgcatctacagctattctcatgcatgctccacctttatgattgttttgaacggtacatgtcaaagctgccggagaacacgacttcttctcccacatagctgttgacttcaactaccgttctgcctttttctttttcgactgccgtcactttggctttcgcaacgacgcgctcgccttctttcacctgtcttgtaaagcggatatttgcgcttgcggtcagcgccagctcatcatcaatgacggctacggcgagtgagttcgcctgcgcaaacaaatgatgcccccgcgcaatttgattgcggctgaagacatgttcgcgtcttacttctaatatggaaatggcctggccgtcaagctccagatcaatgatttcaccgatcacttcgtctaaagacaatgatttcacttcatcatcaagcgtttgttctgccacgtttttaattctttccctcagctccggtattgagagctctaagcggtctaaacggatcgtctgaatgctgacgccgaatttccccgctaattcttcatctgtgatgaagggtgtcgatttgatcgtctgctgcaataatttttggcgttctttcttgcttcttctcatctgtaaacaccatccggacaattaagactaggtactaatagtagtatataatctcatagattggaatgcaatgattgttttttgaaagccgccgaattttacagaatcagcttaatttctccccttctaggacgccgcttgaaagtaattgaccgcgcagcatgcggtattcgtcatctttccaaaaagcctctgaagacaccagattggccgcatcctggcgggccgtttccaaagctctgtagtcatgaaccatatccgccaccttgaactcgggcataccgctctgtttttttccgaagaaatcaccggggccgcgcagttcaaggtccttttcagacagctcgaagccgtcgtttgtctctgacatgattctcatccgttccttcccggtttcggatttcggatcggccatcaagatgcagaaagattggtggtctccccgcccgacccggccgcggagctgatggagctgagataatccgaaacggtcggcgtcatagatgaccataatcgtcgcattcggcacgttcaccccgacttctacgacggttgttgacacaagtacctgacattgattggcgctgaattctctcatcacttgatctttttcatcagaatggagcttcccgtgcatcaggccgacattccatttaccgcggtaaacgtcagacagcatgttatatacgtcaatcgcattctgtacatccagtttatccgactcttcaatgagcgggcagataatataggcttgccttccctgcttcagctctttttctataaaagccaaaatccgctccagcatgtcgtgtttcacccaatacgtttcgatttgttttcgccccgcgggcatttcatctatcacggaaacatccatttctccgaagacggtaatggccaacgttctcggtatcggggtggctgtcataaacagcacatccggatcttgacctttattcttgagttttttgcgctgttcgaccccgaaccggtgctgctcgtccgtaataacaagactcagcgctttgaattccacttcatcctggattaaagcatgggtccctactaaaatatcaatctctccgagagcaagccgctccaaaagctccctgcgccgctttccttttacagaactcgtcaaaagcgcgatatttacatcttcatttgcaaacaacgatacgagagaatctgcatgctgttcggccagaatttcagtcggcaccattaatgccccctgatgccccgacagaatcgcagcgtacaaagcgatggcggcgacggccgttttccctgaaccgacatcaccttgcagcagacggttcattcggtaaggggatgtcatatcagcggtaatttcccgaagcacgcgcgtctgtgcggtcgtgagcgaaaacggcaggctgtctgtgaaagcggtgagcttttcagcaggaaacacatggctgatgccttttgactgttccctttccgctttacggaacgcctgcattttcagctgaaataataagaattcctcataaacaaaccgtcgtcttgcctgctgtaacgattccctcgtttcaggctgatgcatcgtctgcagggcatgtttgtaatcaggcagcttatagcggattctcaatttttcaggaagcggatcggccgcactgtccaaatgatgctgcagcgcttccttaataaaccgtctcatcatttttacggtgacgttttctttaacggaataaacaggctcaatgcttttatcttcttgatgaggaccgttttttaattcctgcacggaaacggtctgtctgtgtttatcccatttcccggatatcgtgacgacagaacctaacgtcagtttcttttttaagtagggacggttaaagcagaccgcggtaattaaataattgccgacaagcaccctgaatgtcagcctgtttcgttttttgccgtaataggtaagagaaggttctgaatgaaccttcccttctaccgtcactctttcttcatgttttacttcttctaaatccctcagctcatagtcgtcataacggtaagggaaataattcagaagatcagaaatgtcatagataccaagttcgtgcaatgttttttctgtttccggcccaatgcccttaatttccgctatactagtttgctgatggtgtgtcacttgatttcagcgctcctccgaaaatttttttctctaattctcttcccgtcggtgtcgcagctaaaccgccttgtcccgtttcacgcagtgctgtcggcattgtctggccgattttgtacatcgcgtcaatcacctcatcgcaaggaatgcggcttgtaatcccggccagcgccatatccgccgcgatcatcgcgttggatgctcccattgcgtttcgtttgacacacggcacttctaccaatccggcgaccgggtcacatacgagaccgagcatatttttcagtgtaatcgccattgcttccgctgattgctgaggcgttccgcccgccatttccacaatcgcggccgctgccatgcctgatgctgacccgacttccgcctgacagcctcctgccgctcctgaaatactcgcattatttgctacgacaaaaccgaacgcgccggctgtaaacagaaaacggatcatttgttctgtcgtagggttcagcttatgctttacggcgaataacgttcccggcacaaccccggcagagccggcggtcggtgtagcgcagatcgttcccatcgccgcattgacttcatttgtcgccacagctttagaaacggcgtctaaaatcagattgcccgaaaggcttcttcccgattggatgtatgcctgaagtttcacggcatctccgcctgttaaaccggtctgactcgtgacgcccttcagccctttttcaacagctgcttccatgacggagagattgcgctccattccttgaaagatttcttctcgtgttttttgcgtcacttccatctcttgggtgatcatcacttccgaaatcggaatttgtttttcttgagtgatttctattaattcttttacattacgaaacatgtcattttcctcctgactttttagtcagctatcttagtaacctgtataatattaggaagtgttgaaagctcgtcaagcacttcttcttcaatattctgatcgacctcaatcgtcatcagcgcaagctggccgacgtccttacgcgccacttccatatgtccgacgttgatggagaatttcgcaagcacattggcaacgcctgcaatcgtgccgaatttatcattgtgaacgactaaaatagccgggtggtttccggaaagtcgcagctcaaagccgttaagctccgtgatttctatttttccgccgccgatggaaataccggtaagggcaagctctccctcatcatcagaaatgacgatacgcgccgtattcggatgaacgggcacggcatcctctgtacggaactctacatatatgcccttctcttccgcaatttgaatcgctgttttaatccgttcatcaaatgtatcaaaatcaagcaggccgccgataatcgcgacatcagtgccgtgacccttatacgtttctgcaaatgatccgtaaaaagacacaacgatccggcggggctcacgcctgaataagcttctggccactctgccgatccgggcggcgcctgcggtatgtgaactggacggaccgatcatgaccgggccgataatatcaaaaacgcttctatacttcatgctggtttgctcctccttaacatcacttcattcagcgcttttctttagactaattgaacatttctcaattggcaagcaggcacactgccgcactgccgcaggtaaataaaggcataagaatagaagggcctgataagcccttctattctgccgcaaatatatatggatacagaggctgtctgccgttatggatttcaacctcgatatcttcacagacgctagcaatatactcagcgagtttctcagcttcttcttccggcgcgtcctctccgtacaggatggtgacgatttcatcttcttccccgatcatttcatccagcagcaatttcgccgcacttatccgatcttcggcgctgccgataattgaactgtttaaaatgccgataaaatcaccttttttaatttctttgccgtcaatatgggtgtctctgactgaatatgtcacctgtccgcttttcacattccggatggcctcaagcatattggcttcatttacatcagccggctggtcagggttaaacgcaagcagggcggtcatgccttgagggaccgtttttgccggaatgacaatgacattttcttcagctacgctcgccgcctgattggcagccatcacaatattggaattgttcggaagaatgaaaaccgtctccgcattgacagactgaacggcttcaacaatatcttccgtgctcggattcattgtctggccgccttcgattacgtgtgaagcgccgatgctcgtaaacaattcagaaatgccctctcccattgccacagtcacgatgccaaaaggcttgcgggcttctttcataacgccggccggctttttttcatcatgttcttggctgatgattgaagtatgctgttccctcatgttttcaattttaattttaatcagatcgccgtaacgctgtgcgagattgagtacgttcccaggttcttcggcatgaatatgaactttcgccagcgtatcatcagccacgaccagcaatgaatcgccgaaacggctcagttcgtttctgaacgcctcttccttgaacgtccgtttatcttgatccagcctcaccattacttccgtacaaaatccgaattcaatgtcttctgtactcagcatgctctgcgcgcttttatgatgctcggcattcaccatatcatcgagtgccggaagaaccgcttttttcggtacggcctctccttttaaagcagccaaaaagccttcatatacacaaagcagaccttttccgccgctgtcaacgacaccgacgtcctttaaaacaggaagcagatccggcgtgcggttgagcgacgcttccgcttcttcaataacggcctccatgactgaaataatatcggtttcttctttggccgaggcgaccgcttttttagccgcatccttggccacggttaaaatcgttccttcaaccggtttcataaccgccttatatgccatatccactcccgcttggagtgctgcggcaaactcttgggcatcaatttggtttttgttttcaatgctctttgtgaaacctctgaacaattgggacaagatcacccctgagtttcctctcgctcccataagcaggccttttgacagggcgatgccgactttgccgatgtcgggtgagtcaatgtgctctacctctcttgcaccggatgacatcgataaattcatatttgttccggtatcgccgtcaggcacgggaaacacgttcagcgcatccaccgcggatgcgttttgagacaatgtctcagccccgccagaatcattgccgcaaaagctctcccatctaagtttcgtctagacaatactcatcctcctcactacgggttcgttactcgtacgccttggacataaatatttacagaatcaactgcaagtccgattgtttgatttactgtgtattttaccttcgtctgaacattgtgggctacttcggatattttagtgccgtagctgacaataatgtacatgtcgatatgtatttgttcggcttcctgacggacatgtacgccttttgcgaagttctctctccggaggatttcagacaaaccgtctttaatctggttttttgaggccatccccactattccgtaacagtcaatggcagcgcctccggcaaccattgcgatgacttcgttggatatatcaatctgtccgtattttgtcttcatttcaatggacacacaggttcctccttcaggtgcatagagttatcattattctactatatgtatcccattatgaaaagaaaagatacagacagcggccttcagcgcggaaatgtgattggttttacatgtcaagtgatttttcttgaaagtaagggaaacaatagttgcaaacggtttttagctgtggtaaattatttaaagtattgtataacgaaagcatctgagacactatgtttaaaaagatgtttcgcgcagttaggagggaaacaaatggcacgtaaatgttttattacaggtaaaaaaacaaaagccggaaacaaccgttctcacgcaatgaacgcttctaagcgtacttggggcgccaaccttcaaaaggtccgcatcctcgttgacggcaaacctaaaaaagtgtatgtatctgcccgggctttaaaatccggtaaagttgagcgtgtataagcaaaaatgaacgcctgcccttttatgcggcaggcgttttttatgcgttcaaagagggcgatttcagcttcttgggcttactcttttctaaatgagcccagcatcgcccggacaattcctcctaaaaacttcggcaatttaatggtataaaatttcattttgtcccctcctataagtcccgtatccgctgcgttcatcactttaggattcatggttttttccgcatatggcagaagccgcttttctaatccgcgctccttaccattattaatatgccttttgcaaacgaaaaagtacctcgtgaatgaatgagttcgttactaatacatagtgtggaacccagaggaatatgacaattatcaaggggatatttaaaaccgtcgagtgtcaggccgtctgccgcttccgtaaacggaatgaaagaaatatagcgtctgcgcgctttttcttcaattgtataacggccgggcccgaacatctgaatgtcattctgccggtcgatcagcttgacatcggtatgcttatgtaaggctttatacagcagctggatgttccctaaaaagtgatcggctcttccgcccgtcacaccgaatacccgaatgttttccggttctttttgtaaagcccagtcaagggcgagttcaagatcggtataatctttttccgcctgatacacatggagggccggcgccgctttttgaatctgcatgagctcctcttccgtaatgctgtcaaaatcaccgaaagcttcctgcggaatgattccggcctccaaaagagcaaccgtccctttatcaactccgacccacgtcgtatctccgtctgtgtattcggatagatcgggaataagctcccgcgggccgcccgcaacgatattgattgtcttcatatgctatcctctctcttagacgcgaaaagagccggcggctttcaccgggctctttttcagcatgtttatgatgcgtttcggatgtcagcgatggcttttttccgatccggctgattatatacggcagacccggcaacaagcagattggcgcccgcttcagcgcataaaggggctgtttctttattaacgcctccgtccacctcgattaaaagctcagacaggcctttctcctcagccagctgtttgacctgacggattttcggcagaaccgaatgaatgaagcgctgtccgccaaaaccggggttaaccgtcattaacagcacaaggtcaagctcctcgatcacatgttcaatcatttggacgggcgtatgcggattaagcacaactcccgcttttaccccctgctcttttatcaattgaatggtccggtgaagatgcggacacgcttcagcgtgaacggaaaggatgtccgcaccggcttttgcgaatgccgggatgtagcggtccgggttttcaatcataagatggacatccagcggcagatcagtcaccggacggacggcttcaacgataagcggcccgattgtaatgttagggacgaaatggccatccatgacatcaatatggatatagtccgcccctcctttttccacgtctttaatttcctcgcccagtgaagcaaaatcggcggaaagaattgatggcgcaaccttaatcatattaatacctcggctttctctcttttatttcctgcataaattctttgtaatgctcgtagcggtacggctgaatctctccttcttccaccgcttgctttaccgcgcatttcggctccttaagatgcagacagcctctgaatttgcaggaggcgcttatttctctgatctcagggaacgtgctgcccagctcttcttcctcaatgccggtaaattcaagcgaactgaaccccggagtatccgcaaccagaccgcctgatgtatgaatgagctccacatggcgcgtcgtatgttttccgcgtcccaaatgcgcggaaatctcgtttgttttcagctcaagctccgggctgatcgcatttaaaagcgaagattttccgactccggactgaccggcaaacaccgtcgttttgtcctcgaagtgtttcacaatgcctgttaagccgctgttttcttttgatgacgtcacatatacgtcataaccgatcgcctgatagtctttcacgtaagaaagtatcgcctctttcgattccccgtctgcagctaagtccattttggttatgcagatgatcgggtgaatgccgttggcttccacaaggacgagaaaacggtccaataaagacgtgctgaacgccggctgaacggcagaaaagacgagaacggcctgatcgacatttgaaatcggcggcctgatgagctcatttgttcgttctttgatttccagcaggtagccttctttatcattttcagcctgataaacggcataatcgccgaccaggggcgttattttattttttctgaaaatgccccggcctctgcattgaatgatcttgtcctgtgattcatccaagacataatagaatccgcttaacgcttttataattttgccctcaggcatagggtccctccttatcagtcattatctttcgggtattcaatcgttttgtagctgacgactttatgatcgaccatcacttgataataccccttctgtccctgatcaatcttcagttcaattgttttttcggtcggctcttttattttaaatgagtcatacgtatcagagatgctgtggtccttatcatcgatggcgatttgcacttcaagctcttccccttcatgttcgggttcgtaaggaatgctgattttttcttttaccgttttcgccggtttttcttcaggtccgagcgagaacgtcacttcaacattacttcccggcttaaccgcagtgccggctgacggctcttgtttcatgacttgtccttccggcacgtcatctgaatgggcttgtttttcaacaagctgcaggccgttatcttcaagataccctgaagccgcttctttgctgtaagtctttaagtccctcagcgtaacgtccgccgggccgaggctgaccgttagattgacttcatcatcgcttgcgaccatatcggtgccggctgacgggtcctgatcaattacggtgccggcctcgctgtcatcgttttcttctttgacattgacatgtttgaaacctttttccttcagcgctttttttgcgtcgccgatctgccgtcctttcacgtcgatcagctgggttttcggttttccgatgcttttgtacagttttacagaagagccttctttaacggtagaccccgcttttgggtccgttttgaccattaattcctcttctattttttcatcttcaatatccgttatatcaggatcagcccggagcccgttcttttcaagcagggcttccgctttttcgtacttcatgccccgtacgtcggggacgcttacatctttaggcataaataaagacgggaacacggtgaccgcaagaacagccgccataataaaaatgaaacagacggccagcaaaacccacggccatttccgttttttctttttggctggctgctgttccttatcatccgtctcccccggcgtttccgcctgagacgcggcttttgggccgtcagtaataacgggaatggcttttgtcatttcctcatcatcctgcacggaaaatttttgttcattcagcctgccggcgtcaaaagccgttctgatgtccgcctccatgtcctcggcgctttcatagcggtgaaacgggtctttggcggttgcctttaaaataatgttttcaacgctctgcggaatggaagggttccactttctggcggaaggcgtttctgtttgcaggtgctttagcgctatgctgacggctgattctccgtcaaaagggattttgcctgttaaaagctcaaacagcacgatgccgagcgcgtaaatatctgattttttcgttgccagaccgcctctcgcctgctccggagacaaataatgaaccgagcccagcacagaattcgtatgtgtgattgtcgtagacgtaagcgctgtggcgatgccgaaatccgtcaccttgatatgccctaaatgatctatcaatatattgtgcggtttaatatcccggtgcacgatatggttttgatgggcatgggcgatggccgagacgatctgctccataacggacagcgcttctttcggatgaagcggtccgtgtgcgtttatgtattcctttaatgtcatgccttccacatattccatgacaatgtaataaatatcgccttcctccccgatatcgtaaatactgacgatattcggatgatcgaggcttgatgccgactgtgcttctcttctgaaacgcctgataaaatcaatgtcattcacaaagtcaaaccgcagaattttaattgcgacttcacgttcgagaatgatgtcctcagctaaaaaaacgtttgccattccgccgccgccaatgggccggaggatatgataacgcccgctgatccgcttgccggttagcacttgtcttcaccctcttttgcatctgcggaaaactcaatcaacacagccgtgatgttatcttcgccgccgttttgatttgctttgctgatgagaaggtctactttttcctgatgatcagattcggcttgaagcatttgtttgatctcgtgatcttctattttatttgacagtccgtcagagcataaaagcagctgatcgccgtcagacagttcaaaagaacgggcgtcggggctgatggtttcatctgtccccagcgctctcgtcaatacatttttccgcggatggtgctcggcgtcctctttcgaaatctcccccgtcttgaccagctcattcacaagcgaatggtcctcagtcagctgagtgaattccccctcttgaagcaggtagcaccggctgtcaccaatatgagccacagtgacaaacttccccgtgaataaggcgcagacaatggtggtgcccattccccggcattcttcattggctttagcgtggtcatgcactttgacattcgcctcatgaatccggtctttcagccaatcctcgcaagcggacggcagagaaggaaccgtttcggtccggttccactgctcttccatcgccgcaaccgccatcctgctcgctacatctccggcaagatgaccgcccatgccgtcggcgacaaccgcaagcaccgcgtcttcttttgtgaaaatgcccgccgcatcttcattatgccggcggactttacctgtatctgttttcaaggctgtaatcaacctcttcacctcgtctcgtcttgacgctccttcgcgcgaagctgaccgcaggccgcgtcaatgtcatggccttgctctcttctgatcgtgacatttacaccgcgggattttaacgttttttcgaatgcgaaaatctgatctctcggtgtgcggacgtaatcccgttcaggcacatagtttaccggaattaaattgacatggcatttcacgtcttttaacagttctgcaagctcttctgcatgttcgacctgatcatttacgccgccgaacagcccgtattcaaagctgatccgtctgcctgttttctcgatgtaatatttgacggcctccataaggtcaggaagcttataggctttgttaatcggcatcagacggcttctgatttccgtattcggagcatgcagagaaatcgcgaaattgatctgcattttttgatcggcgaaatcgtaaatcttcggaatgattccgctggtggaaactgtgatatgacgcgctccgatgttcagccctttatcgtggttaatgatttttaagaaagcgagcatttcattgaaattatcaaacggctctccgattcccatgatgacgactgagctgacgcgttcatccgtttcatcaagcgccttttgcactttcacgacttgagcgacgatttctcccgcttcaagattccgtttcagaccgccgagcgttgacgcgcaaaatgtgcagccgatccggcagccgacctgtgtcgttacacatacagaattaccatactcgtgtctcattaaaaccgtttcaatcgtataaccgtcatgaagctcaaataaaaatttcatcgtgccgtcttgagatgtctgttttacagccgttttcagcgttgtcagcacaaaattgctctcgagtttttcacgcaggctttttgagaggttcgtcatttcatcaaatgaagaaacccgcttttcatagagccattcaaaaatctgtgctgcgcggaacggcttttcgccattctcggtcagccattgtttgatttcatctaattcaaaagagtaaatggacggctgctcagtccgcagctctttccgtacgcttgtcttttttaattgtgtcatttttatcccttctttctcatgctgctaataaagaaaccgtctgttccgaaataatgcggaagaatttgaaggcttccatcctgaacaaagggtctcgccttttcaggcagccgcttttcaagagacaaatcgggttcaaactcagggtgttcttgtataaacgcatgcataacttcttcattttctgtccgatccattgtacacgtactgtatacgagtgtgccacctttttttactaatggggcgatttcccttaaaatgccgagctggatttctgacagccgtctgctgtcctccggcgtcttcgtatatttcatatcgggttttcttctgatgacgccgaaacctgagcaaggggcatcaacgagaatacggtcaaaccgttctgcgccaaaggcctctcccgcttttcgcgcatccatcgtttgcgcgtcgatgatcgtaagaccgagccgttctgcgccctctttaatcagcttcactttatgacggtgaagatcaagcgatgtgaggctcccctcgttctccatcagttccgcaatgtgagccgactttccgcccggtgcggcgcatgcatctaaaacggtttcgcccggcttcgggtccagcgcccgggcgacaagcattgagctttcatcctgtatggatacccggccgttttggaaaaatgccgtgttcgcgatgcttcctttcaaaagcttaatcgcatcaggagaaaggtctccggcttccgcttccagaccggcattctccatctcattcagcaccgtttccctgtcgctctttatgtgattgacacggagcgtctgcttcggcggaatgagatgaatccggcagattttttcagccgcctcaaagccgtacgcctcgacccactcttttacgagccattcgggatggcttgtctctgtagaaagacggagaaccgggtcttcaatttcagcaaatgacggcgccccctcacgctgcagggagcggagaatgccgttgacaaaggacgcaatgcccttatgcccgcgttttttggcgatttcaaccgcttcatggatggcggcgcgatccggaattttttctaaatactccatttgatacgcggacagacgaagcagctgaatcacccacggcttcaccttattcggcttgcggataaaaggcttcagcatatagtctaaggcgattttattttgcagcgttccgtagacaagctctgtcagcagtcctctgtcctgatcgctgagcgtgttcgttttgataaccgatgtaagaagcaggttgctgtatgcctgattttgctcaagcttctcaagcgcttcaagggcgagctcccggacattaattttcttcatttgctgctcctaacacgtcaccgggctgcacatttttgcctcttacaaaatcttcgcccttcatccgttttttccccgccggctgcagctcagtgattaaaagggcggtgctgtttcctgatgcgacgacaatgccgttttgctccgtgcggatgactgttccgggcgcagcatcagtttttgccgcaactttttcagaagcccatactttaatagtttgaccgttcaaagttgtataggcgacaggccaagggtttaaacctctgatctggttgtagatctcttctccgggctttgcccaatcaatccgctcctgctcacgcttaatgttaggcgcgtaagtcgcttttgattcgtcctgtttgatcggtttaatatttccggagatgacgttcgggacggtctctgacaaaagctttgcccccgctatgcttaatttgtcgtgcagcgtgccgacgttatccgtttcatgaatttccacttcgattttagaaatcatatcgcccgcatcaagcttttcaaccatatacatgatcgtcacgcctgttttcttcttgccttggagaatcgaataatgtatcggcgctccgcctcttaattcaggcaatagtgacgcgtgtacgttgatacagccgtatttcggaccgtccagcagctgcttgggcaggatctgtccgaatgccgccgtaacaatcaggtccggcttcaggcttagcactttttctatttcttcttcgagccttactttttcgggctgaagcacgggaatgccgtgacgttcagcttcagcctttacaggagggggcgtcatgattttttttctgcctttcgggcggtcaggctgcgtaacgacaccaaccacttcatatccgtcttcaataagcgtgcgcaggacgggaactgaaaagtcgggcgttcccataaaaacgatccttgtcatccaatcatccttccatttctgccagttcttcttcagtgtagtaagccgtaatttttgatgtgaataaaatgccgtctaaatgatccatttcatgctgaacggctctggccaaaaaaccctccgcttctaaaataaacggttttcctttacggtcgtgggcttttacctttacgtaatccgggcgggtgacatcaccgaaaaccccgggaaaacttaagcagccctcgactccggtctgttcaccgctcttttcaagaataaccggatttacaaggtcgatccggccgctttcttcaccgatgtccacgacggccgctctttttaaaatgccgatttgcggcgcggcgagaccgacgccatccatttcgagcatcgtatcgtacatatcgtcaagcagtttttttaattttttatcaaacactgtcacttcatcggcgggtgtttccagaacctccgccgggtgtgtgacgattttttttacagccaaaattttgccctccaaaaactaatgttacatcagcatgtacggattcatatcaattgaaatcattacatgcttttgcgcaatgtcgcgtttatagtgctccagtatctttttcaactgaatctgcaactcgttttcctgtctgtattttatcacgcattgatagcgatatctatctttgatcctggcaatcggggaagccgccggcccgagaattttcgtatcaggcccgcatcccgctcttaaatagtttgtaatcttttctgcggtgaccgcggcttttgccgcttcttcatgagaaacggtcaccagcgccacgtaataatacggcgggtatgactgggcccgtctgtgcgccatttcctgctgaaaaaaagtttcatagtcgtgcgttttcgtcagctgaatgctgtaatgagacggtgtatacgtttgaatgaccaccgttcccggcttttcatgccgcccggcccgtccgcttacctgtgtcagcagctggaatgtcttctccgcggccctgaaatctgggatgtgaagcgtcgtatcggcgcttaatactccgacaagcgtcacgttcggaaaatcaagcccttttgcgatcatctgcgtaccgagcaggatatccgccttcccttcaccgaacgctgacaacagtttttcatgggcgccttttcttgaagtggtgtccacatccatcctgatcacgcgcgcctgaggcagcactttggtaagctcctcctccacacgctgtgttcccgtgccgaaaaagcggatatgttcgcttccgcattccgggcatgttcccgggacaggttcctcatggccgcagtaatggcatttcagcctttgtccgtagcggtgataagtcatggaaatgtcgcaatgcggacattgcggcacataaccgcagtcccggcacatcacaaacgaggaatacccccgtttattcagaaaaaggacggcctgctctttttttgcaagcttctcttccagctgttccatcagctctcttgagaacattgatctgttgccgtttctcagttcttctctcatatcaacgagagaaacgtcaggcatgagctggcggtttacgcgatgttttaacggaagcagctcataaacgccttttttcgcccgcgcaaatgactccaatgtcggcgtggcgctcccgaggacgaccggacagctgtgatgctcggcccggcggatggctacgtccttcgcatgatatcgcggcatttcctcctgcttataggaagattcgtgctcttcatcaataatgatcatgccgagattttcaaacggggcaaagatggccgatctggctccgacgacaagccggacttccttgcgctgaatcttccgccattcatcgtatttttcacctgtggataatccgctgtgcatgaccgcaacctgtgagccgaagcggcctttaaaacggttgaccatttgcggtgtcaacgaaatttccggaacgagcacgatggcttcttgtccttttgccagcactttttcaatggattgcaggtaaatttccgttttgccgcttcccgtgacgccgtgaagcagaaagacgtgatggacatggtcggctacagcttgtttaatcggctcaaaagcggcctgctgctcttctgtaagagagagcggctctgtttttttgaacattctgtcctgataaggatcgcggtaaacctcctcaaagctttccgtaagaagcccctttttaagaagcgttttcagcgtcgcggaactggaatcggtctttttgcaaagttcagccgcggaaatcttttctcccccgccgataaaataagtaagcacggcgagctgtttagaagcctgctttgtcaatgaatctgcgtgccgggcgagttcttctttgtctgcccccgcttcaatcatgcggatcatttttttattcgttttttgggcgactttatatgtgacatcaatgcttcctttacgcacgaatttctgaagtgacgaaagaatgctttcatcggtaatatccgagtacagaagacttttttgattcctgaaaagctgtttgatgtccggtgtcagcgcttcttcgtcaacgactttcagctctttctcgtacttcgccttcaatgcggcgggcagcattgcctgaagcgccgtgattttaaacgacagcgttttgtcagaaagccatgaagacagctgcatcagttcctcagtcagaacaggcgtcaaatcaagaagcttctcgacttccttcattgagccgccgtttaattcggacgaatctttcaaaccggtcacaaatccttgaagcttgcgcgggccaaacgggacaatcacccgcatgccgacttcgatcatcccttttaaatgatcgggaattttgtaatcaaagggtctgtcaatgtttttggagctgacatcgacaatgacttctgctacattcatacgggttttcggtcctcggctttcaaagctgtcatttccttcagcatttcaaaggaaacgtcaagtttagacataagcgcaagctcccgttttcttccgtcccggaaatagaaggtgacgacattcgtatccgtgccaaatccggccccttccgctttcacatcattcgcaacgatcatatcaaggtttttctgttcgagttttctgcgcgcatagcgttcgacgtcttgcgtttcagccgcaaatccgaccagcagctggtgtgttttccgttcgccgagttctttcagtatgtctgccgtacggttgaattcgatcacgagcgaaccgtctttcttcttcattttgtgatcagaaacagccgccggcgtaaaatcggccacggccgccgtcttaatcaccatgtcgcatgaatcaaacacagaaagcacggcttctctcatatcggctgccgattgcacaggaagaaactgatacagcccgactggcggctctattgacaccgggcctgaaatcagcgtcacccgcgccccgagacggacggcggcttcagcagcagcgtagcccattttgccggtggatttatttgtgaagaagcggacagggtccacggcttcgcgcgtcggaccggccgtaatgacaatatgttttcctttcagcggcgcatcgtcttcaggctccttaaaatgctctctgacacgctcaacaataagctccggctcctccagccttcctttgccgacatatccgcatgccaaatagccttcactcggctcgataaagcggaccccgtcctgataaagcacagagatgttccgtttcaccgccggatgatcatacatatggacattcatcgcaggcgccacccagaccggggcctcagccgccagcaccgtcgttgtgagcatatcatcagcaattccgttggcaagcttgccgataatatttgccgtagcgggcgcgacaataattaaatccgcccagtcagcggcatcaatatgagaaatcaccttcggattttgttcattaaatgtatctgtatacacttcattccggctcagcgcctgaaatgtcagcggagaaacaaactcacgcgcggactcagtcataatcactttgacatttgcgccggcctgaaccagcttgctcgtgagtgcggaagctttataaacggcaattcccccgcttacgcatagcaaaatgtttcggtttttcatgaagtcttctcctcctttatgaaagcattggacaaatcccaaacggaaaaaaataacaacctatgtagagataggttgctacgtgtgcttgttattcgctgtcttctctttcaaacgaaagcaggcccgcgtcaatttcttctaaagctttgcctacatatttgtgagaaatggtatgttcaatctgctggtcctttttgatctgcatttcacgcgcgcgtcttgcagacacagtcaccagcgtatatttagaatctaatttattcattaaagagtcaattgacggatctaacataagttattctacctccagcattttcttatatctcggagcaacgcgttcacgttttaagtgctcggcgagaacgattgcgttaatcttatcacaagccgtttggatatcgtcgttttcaacgacataatcatacgcgtccatcatttcgatttcagcttttgcggcattcattctgttttcgattaaatcgtcggtttcagtccctcttgtcacgattctgtttttcagctcagaaagactcggcggcgctaagaagataaacaggccttccggaaatgcattccgcacttggagcgcgccctgcacttcaatctctaagaagacgtcttttccttcttgaagcgtctgttcgacataatcaacgggcgtaccgtaatagttgccgacatattctgcccactcaagcagtttgttgttttcaatcatgcgctcgaattcatctctggatttaaagaaataatcgacgccgtcgacctcgccctctctcgggtttctcgtcgtgactgaaattgagtattcaaatttcgtgtcctgttgtgaaaatattgcttgccgaaccgttccttttccaactccggagggacctgagagaacgattaataaccctctttctttcatgcggcaattacccctgcccttcatccataatttcttctttcacagaaagtctgtgtgcaactgtctcaggctggacggcagataagataatgtgatcactatccatgacgacaactgcacgggttcttcgtccgtatgtagcgtctattagcattccgcggtctcttgcatcctggatcattcgctttattggcgcagactccgggctgacaatcgaaatcatccgattggcggagatgatattgccaaatccgatattaatcagtttaatcgtcatcttctacgttccccctgtaaaatagacgtctctagtgtaacctgaagagaccgtctgtaaacaatacgcacagtcgctattctatattttgcacttgttccttcaatttttcaatagaacttttcatttcaacgacaagctttgtgatttgatgatcattggcttttgagccgatcgtgttcgcttcccggttaagctcctgaacaaggaaatcaagtttgcggccgactgccccgccttcttttaatatatcacggaattgaacaaaatggctcttcaatctggtaatttcttccgttatatcagaacgatcggcgaaaatggcgcattccgtgatcagcctgctttcgtcgagcgcgtcctccgtccattccttcattcgggcgtaaagacgctcgcggtattgaataacaacggccgaagcgcgctctttcacctgttcggacagcgtctcaagccgctcaatgtgcagaaagcagtcttccgccaaaagccggccttctttttccctcatgtcacaaagttcctttacagccagctcagcggcttccctgatgacttcttcaagcttgtcatcacgcatctgttcttcgtgaatctgcgcaatatgttcaaatctaaagaaatccattgcatcgggttctgcggccaggctgtagcgctctttcatggcgcgtgcggcgctcacatattcatcaaggagctcccaatcgatgttcaggcttctttttatgagcgcgtcactgttgacagtgagaaacagctctactcttccgcgctgtatatgctgcaatatcgtttgtttcagcttatcctctacatatagcaaaggccgtggcaggcgggcgttcacttctttgaaccggtaattgacggatttcaattcaacggttgccgagagatcgccttttgtgctgcttgcgctgccgaagcctgtcatactccgtatcatatgaaacacccaattctttcccgttatcaaaataaaagggcaatagacatgctattacccctaagattatatcatatggaattatttttttcttgtcaaaagtgaacccgccagcaaaaaagtaggtatgccagacatcccgataatcagcatccaatcgcccggcgtaatcggcactgttttgaaaatcggctgcagcggcggataatagatgacgatggccatcaggaagacagaagaaacgatggcgccgagcagataaatattttcaaacggattccgggagaaaacagacgtttcgctccggcagtcaaacacgtgtataagctgagccaggacaagagtcgcgaatgcaacggtctgtgcgtagggcagattttcaggattgcggtgatagacgatgataaacgctaaaatggttgcggctccgattaaaaaccctcttgatacgactttccagcccagttttctcgcaaacactccttctttcggatgccgcggcttccgcctcatcaggtctccttccggctgatccataccgagggccatcgccggcagcccgtcagtgactaagttcacccacaatatctgaatcgggacgagcggcagcggcagagcgagaagcatcgcaaacagcatcactaaaatttcaccgacgttggaggccagcaaataccggacgaattttcttatattttcatagatattccgtccctcttttatggctgatttaatcgtagcaaagttatcatctaccagaatgagagaagaggcttcctttgccacatccgttcccgtcacgcccatggcaacaccgatatctgcctgctttatggccggcgcgtcattaaccccgtctcccgtcatggcgacgacgtgtccgttttcctggaacgctttgacgattttcaatttatgttcaggtgacacgcgtgcgaagacgtagacatcatcgaccgtttcgataagttctttgtccgtaagctcattcagcgtcttgccgtccatcacacgcccctttttcggaagaagacgcaaatcttttgcaatggcctttgccgtttcgacgtgatcccctgtgatcataaccgttttaatgccggcttcacggcattctttaatggcctgtctgacctccggacggggcggatcaatcatgcctgacaagccgagcatcgtcagatttttttccgcctgctccattgtcggcttttctccgggcttaagcggtttataagcaatcgcaatcgtacgcaaagcttgcgacgccagctctttcagaaccgcttccgtttctgctttcttttctcctgaaaaaggcgtacttcttgcgccgtgcatcagatgtgacgagcggtcaatcagcacatcgggcgctcctttagtgatgacgaactgctttttttcctgatcctctacaatgacggtcatcattttgcggacggagtcaaacggaaactcggcaaccacgcggtaatgcccgctgagccaatcgtttgaatagccgccctttcttgcagccgtcagcagcgctccttctgtcggatcaccgtcgagtacataacggccgtctttcagtgcgatttcagatgtgttgcacaacgcgccgaaaaccagcatctgttcaagaatcttctcatctttcggcttgatttcccgctcatctcgggtgaaaacgccctccggcacatagccgatgcctgacactttataaattttgccgcctgaccacatatgggtgacggtcattttgttttgtgtcagcgtgccggttttatcagaacaaatgacagaggcgcagcccaatgtttcaaccgccgggagctttctgacaattgatttttgtttgatcatgcgctggacgccgattgataatgccaccgtaacaatggcgggaagcccttccggaattgcggcgacggccaatgacaccccggccaaaaacatgctgtaaagatcatgtccctgtaagacgccgactgcaacgaccaataccgttaaaaggagcgcgacgataattaaaattttgccgagctcttcaagtcttcgctgcagcggtgttgaaaggctgccggcggattccagcatatcggcaattttccccattgccgtattcattcctgtaccgacgacgacgccgacaccgctgccgcgcgttacgatcgtacccataaacgccatattgctgatgtcgcctaacgaaacatccggctttctcaatttatcggcttgtttaaccaccggaattgattccccggtcagcgccgattcctcaatttcaaggcttttcgcttcaacgatccgcacatccgcgccaatccggtcgccgcttgaaaatttcatgatatcgccgggaacgagctccttggactgaattttcttccagctcccgtcccgcaacgctgacacatacggcgttgacagctcttttaatgcatgtaaagacttttccgcccgccgctcttgaaaaaaaccgagaaccccattgacaaatacaatcgccataatcgctacggcatctacatattcgcctaaaaacccggatattaaggttgccgccagcagcacgagcaccataaaatctttaaattgggcgaaaaacacggcgatcgccggtgtcctcttgccctcctgaagctcgttcggcccgtgcttttcaaggcgttttttcacctctttttcggtcaacccctgtttaatggacgtatttgttgctttcagcaaatcggtttgtcccatttcatgaaacttcattcttctcgtccactcccctgcctcgctttagagatgtcactctgtaaacaagcttattctgactcgtcccttttcatgctataattatcgaatgcaggaagaaggaaagggtgttttatatgtcttttgatggcatgtttacatacggaatgacacatgaattaaacagccggatcgccggaggacggatcacgagagtccatcagccttttaagcacgatgtgatattccatatccgcgccaacggaacaaaccacaaattattattgtcggcgcatccgagctattcacgggtgcacatgacaaaccaggcctatgaaaatccgagcgagccgccgatgttttgtatgctgctcagaaagcatatagaaggcggatttattgagaaaatagaacaggccggattagaccggattatgatattccgcataaaaagcagaaatgaaatcggcgacgaaaccgtaagaacgctgtatgttgaaattatgggacggcacagcaatattattctgactgacggagaaggatccatcatcgacgggctgaagcatttatctccgtcgatgaacagctaccggaccgttctgccgggctatgattacaagcttcctcccgctcaggaaaaaatttcgccgcttgccgcggatgaagaggacgttttgcgttatctcagttttcaggaaggacggcttgaccagcagatcgtcagacatttctccggtgtttctccgctgtttgcaaaagaagccgtgcacagagcgggtctcgctaacaaaataacgctgccgaagacgctgattgaaatgttccatgccgtgaaagattgcaggtttacaccgaacattacgacagccggcggaaaggaatacttttatctcctgtctctcacacatgtaaacggagaggagcgcacctttcactcactgagtgagctgttggaccggttttatttcggcaaagcggaacgcgaccgcgtcaaacagcaggctcaggatctcgagcgttttgtcgcaaatgaacggaaaaagaatgccaataagataaaaaagctggaaaagacgctcgactactcagaaaatgcgaaggaattccagctatacggcgaactgctgacggcaaatttgtatatgctgaaaaaaggtgacaaagaagcggaagtcatcaattattatgatgaagaaagtaagacggtgaccatccctttaaatccgaacaaaacaccgtcagaaaacgcgcagatgtattttacaaagtatcaaaaggcgaagaattccgtcgaggtggtaaaagaacagatccgtctggccgaggaggaaatcgcttatttcgatcagctgatccagcagctctcctccgcctccacaaaggatattcacgaaataagggaagagcttgtggaaggcaaatatctgcggccgaaacagcagagaggacagaaaaaacagaagcagcacgttcctgttttggagcaatatgaatcttcacggggattgacgattcttgtcggcaaaaacaataaacaaaatgagtacttaacgacaaaagctgccgcgagggatgatttatggttccacacgaaagacattccgggttcccacgttgtgattaaaagcagcgatccggatgaacaatccatactggaggcggctgcgatcgccgcttatttttccaaagcgaaagattccggctccgttccggttgattatacaaaaatcagacatgtgaaaaagccaaacggcgcaaagcccggatttgtcacctatgacagccagcataccgtatttgtcacacctgatgccgaccttgtcatacggctgaaaaaataaacgcacctccaagctgaaacccgcactcggcttggaagtgttttttattacgtataaacggagacgaaactctcccagccgtcagaaccgatctttacagtatctgatcagtttcccgtcatgtctgcatgatccgccgggccgtctgtgatttaaacggtcacacctgatttggcggcggatactttcaccttccctcgccgaacctgagcacatccgggcgggtctctgacctttcctttgtatgcgggcgaaatccaggcggcatcgggatcacatacatattccgcatcacttcgcaatcctgaccgcttgtcggcatataccattcaaactgcccgctttcgttttgaatttttcacattcggcggactgtcaggacagtataaaaaacaccctgcctgatgacagacagggtgttttttatggtcttcttcttttctcaaataatcgatccacttcttcagccaaatcagcagtaatgagaggctttatgtcctcagccagtcttttcgtatgtgcagggcttgcgccgcttgttgatacggatacttgaatgcgccctttgcggatgatcttcggcatatacacgctgccccgttcagcctcgcttacacaattgaccagctgcgtttcagaagcgccctcggttatctcccgattcacgttgcggtcatttgtcgcggcaatgatgaaaaaagcgggcgcgagatccttcatgtcaattttacgggaaacccagcggatacgtccttcatccgccagctgtttaatttcaggcagggcatcgggactgattacagtaatatccgcgccttccgaaagcactgttttgagtcttcttaaggcaacattgcctccgcccgcgatgacaattctttttccgctgagattaatgtgcagaggcagcatactgtccccccttaaaatcaaactgcccgccggggtttcggacagcttccgtcacacggttcaaaaacgcctgcttaatatgcgggtgaaaacctaagtatgaagcgagatgaacattttgattgaccgtttgaagcttttgaacttcccgttcaatctcagtcattaaaagcccggtaaacagaagatatggaacgataaaaacgggtgctccgtcatcctcttcaaggccggcaaacacttctttatagtgcgggtcacatgctgttaaaaaacaagggatgacttctttaacaggtgtaatcgcctcaagttttccggcaatctcactgactgcgcttttaactgccggatctgtgcttcctcttccgatcagcaccactttcgcctgctcaatggacactccggtatcttcaatgcgatgatgcacggcttttacgacttcatcgtccactccgatcggaacaccatatgtcacttttatatcgggatgcagggccgccgcacgggcgatttcagccggaatgtcatgtttcgcgtgggcagcggtcaacagcagcaaaggcacagccgcaatatgagtggcgccttgtctgacacaagcttcaaatcccgcttcaatagacggttcctgcagttctaaaaaacagatttcctgaatgggagcgtcagcgtgtggcatgcacccttttaaaaacgccgccgactctgtctgcgcttttttcagcctgcttccgtgtccgatatataaaatcgcctgcttcatttacaacgcctcgctcaaatccggatttttctgatcagatgcataccagtccagtatgcagtgataattgacgacatcaccgataacaattaaactcgggtttttgatttcttcttttatcactgtgtctgaaagcgtgccgacggtgcagacgactgttttttgcctgtccgtcgtcccccaatgaataaaggctgccggagtgccgccgtctctgccgttttccagcagcattctttcaatctgccggatatttttaattcccatataaatcaccagcgtatcaatgcccgtcgccagcgctttccatttttcttcaaagtcgtcttcttgtttataatgccccgtaacgaatgcgacattggagctcgcctctctgtgcgtcaccggaatgccggcataagcagcagccgcgattcctgatgtaatgccgggaacgatctcaaacggaatggcgttttgcgcgagagcctccgcttcttcgcctccgcggccgaaaacaaacgggtcgccccccttgagccttacaacggttttcccctttttcgcatacttcacaaggaaacggttgatcgtatcctgtttcataatgtgaaaatccgggagcttgccgcagtaaatcagatccgcttcttctccggcgtactgtaaaatctctttgtttaccaatctgtcatataatataacgtccgctttctgtatggctttcattgccttcaccgttaataagtccggatctcccggaccggctccaacgataaatactttccccatagcatgtctccccgatccgttttgaaatcttcccagaacagccgcgaggccgcacttcagctattttaccatatcccgccattgcgggggatatccggctgattgcgcggcctttttggacctattatgctaagctgtttttcacaaagtcaaccagtcttccggtgcattcttcacgttcaaatttgcctgaatcaagtacgagctcaggcgctttcggctcttcatacggtgagtcgatccccgtaaagaacggaatttcaccatttcttgcttttttatataaccctttcggatcgcgcttttcacatatatcgaggtcgcatttcacgtagatttcattaaattcgccctctgccacaagctctctcacctgatctctgtcctcacggaacggagaaataaaagccgtgatgacgatggttccctgctgaacgaaaagcttcgccacttccccgatgcggcgtatattttccttgcggtcatcatcggaaaaacctaagtccttgtttaagccgtggcggatgttatccccatcaagcacaatgacttgatagccttgttcaaacagctcgcgcgctgcggcgtttgcaattgtggatttccctgaaccgcttaagcccgtcagccagaggatagagcttttatgcttgtttttctgctggtattcttctttcgttattgaggcttcatgccatacgatatcacgatttgtcactctattttcctccttaagaaacgcctgcttcttctttcgttttcagccctttaatcaacacctcgacaacttcaggacggctgaattccgccggcggcatgacgccgcttcgcagcatttctctgacctttgttcctgacagaatgacgtggtcttctctgtcatgcggacatgttttggccgttcccatgttgccgcatttctggcagaagaagctgtgctcgaatttcatcggtgtaattccgagttcatccgctgtaaattgatcaaacagctcttgcgcttcatatgtgccgtagtaatcaccgacgccggcatgatcgcggccgacaataaaatgcgtgcagccgtagtttttgcggacaagcgcgtggaaaatggcttctctcggccccgcataccgcattgccgccaaaaacacgccgaggaatacgcggtctttcggataataatgatcgagcagcacctggtagctttccattctgacatccgccggaatgtcatctgattttgtttcaccgacgagcgggttcaaaaacaggccgtcaaccgtctcaagcgcggttttttggatatattcgtgggcgcggtggaccggatttctcgtttggaaaccgacgatggttttccagcctttttcttcgaagcttcgtcttgtatcggcaggttcaaatgtaaactcaggaaactgctttgacgcttttttaattaatgtgatcggcccgccgacatacgtatcgccgcgtgaaaataattttttcacgcccggatgcgcggcatcatcggttttatatacgtgaacggcttctttttgtttatccggcgtataaatatcttcgatgtcgacgacgccgtatgtttctccgccgtaagtcagtttcaccgtgtcgccgacggcaagctcagccgctttttctgaatcgaccggaagcgtgatcggcagggaccagacaacccctgatgctagacgcatattttcaacgactgatacgtaatctttttctgtgaaaaatccttcaatcgggctgtaccccccgatcccgatcagctctaaatcagcgaacgaaatcaaatcaagctcaatttctttgtggacggatgtaagatcatactgctcattcacccgattaattaatgttcctccgtgcggtgctaaactcataatacatgattcctcccagttaacagataaataaactcagattaatagttaaatgcccccgccttgttcatggacagagcgtttctcttttcggatggctttcatcagactggcggctccgccagctgccaaaagcacgctggccatcataaagatggaatagtaatctccttttaacagcagggagacaagcagatacgaaatcgacagtgacaaaaacggcgaaacaacccatactttgagcatcgttttcacgacttctttatgaaaaacgttcggcccgtttttggccattccgataccgataattgatgatgatgtgacttgcgccaatgggaccggcagaccgaagacggaactgataatgacaagccccgcaccggttcctgaaagcagtatgccttctccggctgaaaacctcgtaatctttttcccgttggtttcaagcactttgcgtcctaaaagcagagcgccgagagcgacaaagatgcctccgtacagcgttccttttgacacgctgagtacgcccgcagccaccaaagggcccaccgcatttgcgacattgttcattccggctgaaaaagcttcccaaaaccccgcaaaaagcagcacaattcctaaaatcttctgtttccgtttcgaaatgactcgaatattcagagaactgaataccttcgatacgagaaaagtgaaacagaacgcgacgaacggtacgagcacccaaaaaatcacgatgaccaaaagatgctgtaaaaacaatactttgtacgcgacgccgacaccgacaatcgccccgacagtgacctcactcgtcgacagcggaatgccgagcacattcgccgtgaataacgatagcgccgccgctccgattataatgcagacaatggtgagcgtaatggtttgttcgggaatgattccgccgctgatcgtcttaacgacttcaccgccgccgataaccgcccctgacaggactccggccgcgcagatgatcagcgcatacgttttctttttaacggcgccggacccgtaagcgactcccattgatgccgcggctccgctggctccgatattcatggcaaaaaacagacagaataaaatagcggctaattccatcgggcagctcctttattcatgcagtccgcattctgttttcgccatgccgttccatctgccgctccgcaaatcttccgcggtaaacgcaggtgaagtgcacggttcacagccgatgctcggatacccctgatcatggaggatattgtaatccagctcatgcttggaagtatatctccagatgtctttccatgtccaatggatcagcgggcatactttaatcgattgaaacttgtcgtctttattcaggaaattcgtattcgcccggctcggcccttgatcccggcgaaggccggacagccatgccggatgccctgcgagcgcttctcttaacggcagaatttttctgatgtagcagcactggttcggttctctttcccacagtttatctccgtgagcctcggcctgttcctcgagagtaaggctgggctttttcaggataatgttcagccccggataacgttctttcactttttcgatcgtttcatatgtttctttaaagtgaagacccgtatcgagaaacacgatttccgcgtctttctttactttagaaattaaatcgatcaggacgatgccctcaatcccgaagctgcacgcgtaaacaagctggtctccgtagtggccgtatgcccattttaaaacggacagcgcgcctttataggaatcgtcttccggaaatgtaatcgccggttcctcccatgtatcatacgttagcattttttctttcctcctcccggagacaatcaaacagttgttgttctctgccggttgtcttatccctcaatctttttttcatataaaaaactttcaatccagcggaatgaaagacagtgacccggtatagcccttatcttcaaaatgctgtgcatttttctggatgcggcaccttgcaatacacgcaggttgccgggcgtcatcggtccagtccctcagccgctcttgataagctttttagatttgtactaaattttagcacaattctaacagaagtcaacccgagttttttgataggaataataaaacaggccctgaggcctgtttttattgtcattattttttaaaccaatcttttgactcgggattcagtttccatgatttcagtttttcaatgtcagctgaatgaatcgtaccgttttcaagcgcgacttcaatcagcgtgtcataatcggttaacgagtaataaggaagacccgcttttttaaaggcttctgttgctttcggcagtccgtatgtaaaaatggaaatgacgccgaggacttccgcgccctctctttgaagggccgccgcagcttcaagcacgctgcctccggtagaaatcaagtcttcaatcacgactgttttttgtcctttcttaatggcgccttctatttgatttcctttgccgtgcgctttcggtttgcttctgacgtagcacatcggcgcgcctgtacggtctgcgagaagcgcagcatgcggaatgcccgccgttgcagtgcccgcgatcatctccgcctcggggaaatgctccttcagcagtttgccgagcccgtccgccacatcatttctcacttttggatacgacaatgtcagacggttgtcacaatagatcggtgataaaatgccgctcgcccacgtaaacggctcattcgggcgtaaaaagacagcttcaatgtgtaatagatgttttgcgatagcctgtttcatcggcgaacgccctcccattccagtttaattgcttcatatgctttaacggggttttccgcttttgtaattgagcggcccacgacgatggctgacgaaccgttttctttcgcaaatgacggagtcgccgtacggacttgatcgtcagctgcgtcactggcggtgcggatgcccggcgtgactgtcagaaatgaaggccggaccgcttcataaatggcttttgtttcatggaccgaacataccactccgtccagcccgcactcttccgccattttgccgtaatgcacaaccgtttctaacagcggcttatgcagcagaagctcttccttcgccacctgctctgaagtgctggtcagctgagtcaccgcgattaaagacgggcgttttctgcctgccggcgtgccttcttcaagcccctcaagggccgcgcgcatcatgcgtgcgccccctgccgcatgcacattgacgagatcaacgccgaggccggccagccgcttcatcgctttattgaccgtagtcgggatatcatgaagctttaaatctaaaaatatatcacagttccgttcttttaattggtgaatgatggcggggccttcctgataaaaaagttccatccccgttttgacaaagagcctttccttttcaaacaagtctaaaaacgttaaagtctcttcccctgatgcaaaatcaagcgcgatgatgggcaggttgtttttcatgtttccagctccttccgatgcattcacttacagattgaaagccgtgttggcgcagcacgtgggggagctgttctatgatttccgggcagacgaacggattgacgaagttcgccgtgccgacggcaaccgcactcgctcccgcaagaagaaattctaatgcatcctctgcggtctgaacgccgcccatcccgataatcggaatttgaacggcctggctgacttcgtataccatccggatggcgaccggtttgatcgccgggcctgacagtccgcccgttttatttgctaaaatcggccggcccgtcttgagatcgagcctcatcccgatgagagtattaatcatcgtcagaccgtcagcaccggccgcttcaatcgctttggcaatttcggctatgtttgcgacattaggcgaaagcttcacatacacaggcactgcggaaacttctttcaccgcttttgtcagttcggccgccatgacgggatcagtaccaaaagcaatcccccccgttttgacattcggacatgaaatgttaagctcaagcgcatgcacattcggcgcttggctgatgtgctcggccacttctttatagtcgtccacctgagaaccggcgacatttgcgataatcggcgtgtcaaattgttcgagccaaggcagctcgtgattgagcacatgctcaaggccgggattttgcagtccgatggcattcagcattcccgcgcttgtctccgccactctcggcgtcggatttccgaagcgggcttcgttcgtcgtggctttaatcataatgcctccaaggcatgataaatcgtaaaatccggcatattctttcccgaaaccgaaacatccggaagcggggatgatcgggtttttcaattggagacccggcagattcacctctaacattacagcgccacctcctcagctttaaataccggcccgtcaaggcagacctttacataggatgtatcgctttcacccgtgcggcacacgcaggcgaagcaggccccgatgccgcagcccatccgctcttccatcgaaagataaacctctttatggccgtactgctgcttcagagctttcagcatcggtgtcggtccgcagcttagcaggacatcgaattcgagctgcttttcacggatgatatcggtgacaaatcctttctctccatatgttccgtcagccgtcgccacataagtgtctccgtacgcacggcattcctgttcgtaaaaaacatcctttgctgattgaaatccaagcacatgaatgacgtttacgcctttttccgtcaggcgctttgacagttcctgcaaaggcggaacccccactccgcctccgactaacagcgcggttttgccgggttcaatccgccgcacgggaaatccgttgccgagagggccgagaacgtctattttgccgccctcttttttcccggacaaaaggcgcgttccctcaccgtcagctctgtagataacggatacttcatccgcggcgaaattgacgtccgcaatgctgagcggtcttcttaatagcggtgtgaccgcgtcactcaccttcagatgaagaaattgtcccggctcggtaaggtgccggacaagctctcctttcagcaccatcttataaatccggtcggcaatttctaagttggattgaacagtcaaatgcgcttttttcatatcgtgactgccgccttttgattggtttcggatgcaggcatatgatccgcccggaatgtcatgctttccaatacccgcaaaatggcttcggccgtatctaaagatgtcaggcaggcgactccgttctcaacggattcgcggcggattctgaagccgtctctggccggctgtttgccctttgtcagcgtattgatgacaaattgcgcttctccgtttctgatcacatcgagcagatttttcccttcttcgccgattttcccgacgacttgagccggaatctgagcgtctttcaaataagccgccgttccttccgtcgccaagattttatagccgatggcgtggaaccgcttggcgatcagcagtccttcttctttatctttatcagcaacggtcaacagcactgaaccgtagttcgggatttgaatgcctgaggcaatcagcgctttatagagcgctttttccaaggttgaatctttgcccatgacctctcccgtcgacttcatttcagggcctaacgtgatatccactcttctcagcttcgcgaatgagaagacaggcgctttcacgaacaccccctgctgttcaggctgcagcccctcttgatagccgaaatcagcaagcttttggccgagaatgacctttgtcgccagattcgccatcggaatcttagtgattttgcttaagaacggcacggttctgcttgaccgcggatttacctcaagcacatacacctcaccttgcgaaagtacgaactggatgttcagcaacccgatgatgttaaggccttttgccaaggcaacagtgtattgttcgatttttttcttaatgtctccgcttaaagactgaggcggatagacggcgattgaatcccctgaatggacgccggcccgctcgatatgctccataatccccggaataacgactgtttcgccgtcagatacggcatcgacttcgatttctttccccgtcagataacggtcgattaacaccggatgctgcgggttgattttgaccgcatttttcatatagtgaagcagttcttcttcgtgatagacgatttccatcgcccggccgccgagcacatacgaagggcggacaagtaccggatagccgatggatgcagcgattttgaccgcttcgttcaccgacacggcggtttttccgagcggctgcggcacattcagcgcctcaagcgcctgctcgaacttatcccggtcttccgcacggtctaaatcttcaagtgatgtaccgagaattttgacgccgcgggcgctcaattcttccgcaaggttgatcgccgtctggccgccgaattggacaacaacgccttccggctgttccaaatcaatgatgtgcatgacatcttctaccgtcagcggttcaaaatacagtttgtctgatatgctgaaatcagtggacaccgtctcagggttgttgttgataataatcgcttcatatcctgcctgcttaatcgcccagacagagtgaacggtcgcatagtcaaattcgacgccctgtccgatgcggatcgggccggagccgaggacgacgacgctttttcttgatgttacctcagactcgttttcttcctcatatgtgctgtagaagtacggggtttctgattcgaattccgccgcgcatgtatccaccattttatatacaggcttgatggctgcttcttttcgcatttgatacagctcttgttccggcatattccattcccggctgatatatttgtcggagaaaccgagttccttcgctgtctgcaggacggcgaggctgcctttttccgctttcagctcggtttcaaaagcgaccagcttacagagcttgtgcaaaaagaatacgtcaattgcggaaaactcatgaagctgctccactgtgtagcctcttctgaacgcttctgcaagataaaacagccgttcatctccggcctttctgatccgtttttccaaaagcccgtcagaaatctcttccgcatccttcagttccaggtgatagacatcggcttccagtgagcggaccgcctttaacagcgattcttcaagggtgcgtccgatggccatgacctctccggtggctttcatctgcgtcccgagcctgcggtttgccgactcaaatttgtcgaacggccagcgcgggattttagaaacgacatagtcaagcgcgggctcaaaagccgcatatgtttttcccgttacgggattcatcatttcatcaagagaaagcccgactgcgattttcgccgcaagctttgcgatcgggtaacccgtcgcttttgaagcgagggcagatgagcggctcactcgcggattcacttcgataatgtaatattggaagctgtcgggatcgagcgcgagctgaacattacagccgccttcaatgccgagcgcgcggatcagctttaatgaaacattgcgcaaaagctgatattcccggtcgctcaaagtctggctcggggcaacgacgatgctgtcgcccgtatggatgccgaccggatcgatattttccatgttgcagacgacgatcgcgtgatctctgctgtctctcatgacttcatattcgatctctttgtaaccggcgatgcttttttccagaaggcactgatgaacggggctgagctttaatccgttttcgacgatctctttcagttccgcttcattcgagcagatgccgccgcccgttccgcctaatgtgtaagcggggcgcacgataaccggaaacccgatccggccgacaaattcctcggcttcctgtaaagtgcggatgatctcactttccggcaccggttcattcagctcattcatcagcgtacggaataagtcgcggtcttcagcctgctggatggcggacagctttgtgccgagcacttccactccgcattcctcaagaaccccgagttcagacagctcgacggcaagattcagtccggtctgtcctcccagagtcggcaggatggcgtccggccgttcttttctgataatacgcgtgagaaactccggcgtcagcggttctatgtatacccgatcagccatttccgtatccgtcataatcgttgccggattcgagttgacgagaatgacttcatagccttcttcctttaaagcgagacacgcctgtgtgcccgcataatcaaattccgccgcctgtccgataataatcgggcctgatccgatcactaaaatctttttaatatctacgcgttttggcataccgcttccccttctttctcagttgtttcgatcaagtcaatgaatctgtcaaataagtgattggcgtcttccggtcccggtgaagcttcagggtggtactgaaccgtaaatgccggcaatgttttatgcttgagtccttcgatcgtttgatcattgatcgcaatgtgcgtcacttcaagctctgtctcatctattgaagaaactgtatatccatggttttgggctgttaaagcgactttccctgtcgcaagctctttaaccggatgattggaacccctgtgtccgaatttcattttttccgtttccgctcccgatgccagcgcaaataattgatggccgagacagattccgaataacggcaccttcccgagtatgccttttatcatttcaatggcttccggcacatctttcggatctccgggtccgttagaaagcatgatgccgtccggcttgagctgaagcacttcttccgccgttacattgtacggtacaacgatgacatcgcattttcttttgtttaactctcttaagatgccgtgcttcataccgaaatcgacgagcacgatgcgtttgccgcggcccggactcggatatgccgttttcgccgatacttgagcgacttgatttctcggcagttccgtttctttcagccttgcaagaacctctccgacattctcctcacttgaagcaaacgttccttttaatgccccggccgtgcggatcattctggtgagttttcgcgtgtcgatcccttgtaagccggggatttttttcattttcagatactcatcaagcgtgtaagctgagcgccagttggaaggcagctcgcacagttcttttacgatcagcccttttacaaaaggagtgatagattcaaagtcatctctgttaattccgtagttgccgatcagcggatacgtcagcgtcacgatctgcccgcagtaagaagggtctgataaaatttcctgataaccggtcattcccgtgttgaatacgacttcacccgcggtatgctccaggctcccgaatgcttcaccctcaaataccgctccattttccagcactagtcttcttttcatttgacgagtctcccttcttcatatgcaagcttaccggcagccatcgttgcaacaggccagccgaagcacttcatcttgttgaatggcgtattttttcctttagataaaaatgtatctttgtcaatggccgcttctttgtccagatcaattagggtgatgtcagccggcgcccccggtgcaagcgttccgtacggaagaccgaatgcctcgcaaggttttaccgtcatgaaatcaaccagctgcttcagcgtccacgtcccgtttttcacaaaatgtgtgtacagaaggggaaaggcagtttctaacccgacaataccgaaaggcgcaagcttcatgtccgtgtttttctcttcttctgtatgcggcgcatggtcagtggcgatgaaatcaatcgtgccgtctaaaagcccttcaatcagcgcctctctgtcctctttgctgcgaagcggcggattcatcttaaaattggtatcaagtcccgggatatcttcgtcacaaagcagcaggtggtgcggcgatacttccgccgtcacgcggatgcccgctttttttgcgtctcttacggctctgacggattctttcgtgctgatatgacacacgtggtaatggcagcccgccgcttccgccagcagcacgtcacgggcgatatgtaccgcttcacaaatggaaggtatacccttcaggccgttcgcttttgaaaaagaaccttcatgcacgctccctccgtaaataagtgagttatcctcacaatgagcgacaatcgctttatttattgaagccgcccgtttcatggcttcatacatcattccggccgtctgaactccgacgccgtcatcggtgaaggcgaatgcgcccgcttcatgaagcgcctcaaaatctgtcatctcttcgccggtttgtctgatcgtaatcgatgcgtaaggaaggaccctgacagatgaggtttctttgatcctgttttgcagccattccatctgctctttcgtatccggcaccggccttgtattcggcatggcggcgactgtggtaaaaccgccccgcgccgcggctttagagcccgtctcaatggtttcttttttctcgccgcccggttctctgaagtggacatgaaggtctacgagcccaggtgaaacgaacagtccctcagcgtcgatcaccgtttctccgtctttcgctgtcagaagcccggtttccgaaatgaattcacccgttacccggatatcatgtaccgctttttctccctgttcatttaatatccagccgtttttaatgagataagacataagccgcttctccccttttcacattggtttgcagtgctctttttaagactgccattctgatatacacaccattttccatttgtttaaagattcttgattttccgcattccactaatgttgtgtcaatttcgactcctctgttcaccggtgcgggatgcatgatgatagcatgccgcttcatgctctgcgcccgcttttcggtcagcccgtatgcttccaggtagcctttttggtcggcttctgtctgatgcctttcattttggatgcggagcagcatgacgacatctgaagcttgtatggcctcatccgtctgaacacaggtgccgaaggcgtttttctcatcctgccactgcggcggcccggaaaacagcacacgtgcgccgagccttgtcagcacctcggcatttgaccttgccactctgctgtgtttgatatcgccatgaatggaaaccgtcaggccctgaaaggtctcaaattcctcttgaatcgtcattaaatcaagcaatgactgggtcgggtgctgtccgcagccgtctcctgcgtttaagaccggaatattgactctgccggtcagatctttgtaatattcatccgtgctgtgcctgatgacgcaggcgtccgctccgattgattccagtgttttgaccgtgtcgtataaggactcgcctttttgaacgcttgtgctcgtgccgtctaagctgagcacgttcatcccgagtttcttttccgccacttcaaagctgaaccgcgttctcgtgctcggttcaaaaaacagattcgcaacgaattttcccgcgagatcgggacggactgcaccctcttttatcgcttttgcctctcgcagcagttctgtaatttcagccgcgctcagttcagacatcgccgttaaatgattcatgttttttctcctccgtttccgcttgaaggccgtaaaaaacaccccggtctatagactcggggtgcggttaaagagagaagagccgtacagcgtcttcccgttataacccttccaagcctctctggactttctttaaaaggtttacatatgatttagtttttccgatgcaatcgcgtcttcttcatttgcatgcggcaggataaggttcaggatgactccgacgattgccgcaagcgccatgccggatatttggaacccgccttttgatacttgaataaaagcccctccgacgccgatcacgaggatgacggatgtgataattaaatttcgcttgttttcataatcaatgttgttgtcaatcagcattctcaagccgctggaggcaatgattccgaagagcaggaaggaaacgcctcccataaccgcggacggaacagagctgatcagcgctgaaactttgccgataaatccgaagcacagcgcaatcactcctgcgccgccgatgacaaagacgctgaaaactctcgtaattgccaggacaccgatgttttcgccgtatgttgtcgtcggcgggccgccgattaacgaagcgataatcgtcgctacgctgtcccccattatggagcggtgcagtcccggctttttaataaaatcctgtccgacgactttactcagcaccatttggtggccgatatgttctgacatcgtcacgaaagcgaccggcaccatcgcagcggcaatgcccaatgtcactgacggcgtgtagtctttgaaagggatgataaattcaggaacggcgaaccattttgcatcaatgaccggctgaaaattgacgatgccctgtgtcagcgcaaacagatatccgcctataatgccgatcaataccggaatcaagcttaaaaatcctcgtaaaaagatggcgcagataatggtgatggccaaagtgacgccggctacactgaaatgtttcaggctgtaaacgagttccttcgcattcggatcagcatacattgccatattgacggctgtgcttgccagtccgaggccgatgacgatgatgaccggcccgacgaccaccgggggcagcagcttcatcagccaccccgttccaagctgcctgatgagaagcgcgatcaggccgtacacaattcccgccaggaaagcgccgaccatggcagcccccggccctcccgtcgccttcaccaagataatcggtgatataaaggcgaatgatgagccgagataagcgggaatctggccttttgtcaccaagagataggcgagtgtcccgattccgctcgtgacaagcgccactgccgggctcattccgaccagtttcggcacgagtatggttgaaccgaacatggcgaataaatgctgcaggctgaatgacagccaggacaatggattggggacgtccctgactcccaggtttacttttttcttactcatggcgttttcctcccggttgactttcaaatggtataaaaaaacctctttgctttttgcgcaaagaggcatacaaagcccggccgtgtcgatccgcccggctttgtgttttaaaatcctctttgcaaactctctggaatgcatttaaaaagggtggttattcattttcgtaaatggcgaccatatcagtctgatcaacttcgctcagctgaaccatcactttttcagcttttgaggtcggaatgtttttcccgatatagtccgctctgatcggcagctcccggtgtcctctgtcgacaagcacggcaagctgtatcgatgacggccgcccgacatcaacgagagcatccatcgcagctctcaccgtccggccggtataaagcacatcatcaaccacaatgaccttttggtctgtgatatcggccggaatgtccgcgccttttacaagcggctcttcattgctcgttttttttgtgagatcgtcacggtaaagggtgatatcgatttccccgacggtgaccggatttccttcaatctgttcgatccgctcggccagccgcttcgctaaataaatacctcttgttttaatccctacaagaatgcagtcattcattcctttattccgttcgatcatttcatgggctatccttgtcagcgcccttctgatggcctgttcgtcgagaataacagctttttgattcaatcgtgacacctctccattcgtatataagaagaaaaaacccctcctgccagagcatagaggggttcctttccaggaccaagacacacgtgtatctcttctgtcctatccgttatccttctcagcctctctggactgtgttaaagaatctattcagcttgtttttattatttcagaaaagaaactcgctgtcaatggctatttctcaaatgttcaatgagttttttcatatcttcaggaaggggcgcttcaaactccatgtattcgcccgtccgcggatggtcaaaacctaatattccggcatgaagcgcctgaccgttgaaatcaatggtttttctcggtccgtacttcgggtcgcctgccaaaggaaatccgatatatttcatatgaacacggatctgatgcgttcttccggtttcaagacggcactctacgagcgtgaagtcttgaaaacgctcaagcacgtggaaatgcgtgacggcgtttttgctgctttctcttgttacggtcatgctttgtcggtcttttttatctctcccgatcggagcgtcaatcgttccgtcatcatgtgaaatcaacccgtggacaaccgctgtgtactttctcgtcacggttttattgacgagctgattaacgagtgattcatgcgccatatcgtttttggcgaccattaacaggccggaggtatctttatcaatccggtggacgattcccgggcgcatgacgccgttaatgcctgaaagatcgttgcagtgagccatcagtccgtttacgagcgtccctgtcacatggccgggcgccgggtgtacgaccatgccccgcggtttgttcacaaccaagacatcctggtcttcatagtaaatgtccaaatccatcggctctgcaagcacgtccaattcttccggttcaggaatggtgacgtttacctgatcgccgggctgcattttataattcgcttttacggatttgccgttaacggataccagtccctcttttacccattgctgcacttgagtgcgtgaccagttttctcccgttgaagccaaaaatttatcaatccgttcgctcttttgttcaggctgaacggttatctcaaattgattcatgttattgctccttctttttcccgctgtcaaacagcatatgaataaataaaagtattacaccgacgcacagtgaggagtccgcgatattaaaaatcggatagtgataatccacgatgatgacatgaataaaatccaccacttcctggcgcgccgcccggtcaataaagtttccggccgcacctcccagcattaagccgagagaaattccgagtaacatctgcccttttgcataacgctgtatgtaataaacgattccgataatcacggcgatggtaatgacgtagaaaaaccacatttggccggctaaaatcccccacgctgctcccgtgttgcgatgagatgtgatataaagcacctggtcgatgacaggtatgctttgtcccaattccatatggctgacgacaagccatttggtcaattggtcggcaataataataaaaagagcgataagataataaagcacacacgttcctccagtatacagttacttttatcctttatgaattttatcagtaaaagatgccggagtaaaggcagatcataagcgtatgcaaacagacgctgtcactcatacagcgcctgatcatatgcataatctccggttacccagtatggaagggttttcttttcaaattgagcgggataataaaaatcatcagcggttctggccgtcggcagcaccgcaagtttttcaatcggaatgggggcgcctgttttttcacaataaccgtacgtattgttttcaaacttagacagggcaagaagaacatcctgaagttcttcttttatatgatagatcagagttgcttcttggtcgttcattgaaggttcaacagatgctgacatttgaaagcaagaatattcgaataatcttgattgaagttcttctttcatcatgagaagctccgtgtggattgcggtcagttgatcattcattcatcacaactcctgctcttgatgttatagctttattgttgccctcagagcgctatttgaagcccataagaattttcctgccgttctaatcgatgacattgctggcatgtaaaaaagcgcccggctgacaccgggcgctttctcatttattatttttgataatatttttcaacgatttccgcattgcgcagtgataatgtcggatatttcggattggctccgacatctttagaaattacgcgggaacgctcacacatctggccttccgctttttctacggtcatttttcctgttgtaaagctttgcgcgttttccggcgcttcactttcgtcttttactgtcagttctgagacgataaacagctgcgcgatgttttctttaatggatgacaagaggtcgcggttttctttgttcggatacaaagtaaggctcgcttccaatgatcttccgataattttttcgttacgggctgtttccaaagctttcagcacgtcgtttcgaagctccatgaagcggtcgaatttttcttctgtcgcctgactgtccggaacagcaatggtttccggcatatctgtcagctgcacgctcgcttcttcaacaaatgataagtgagaccacatttcatccgccgtatgcgggagaatcggcgccgtcagtttcactaacgccagcagcgtttcataaaagacggtctgcatgctgcggcggtccggatgatccgcatgctcgatgtacacaacatcttttgcaaaatcaagatagaaggagctgagctcgatcgtacagaaattgtgaatgctgtgataaacaaccgcaaattcgtattcatcgtacgcttttttcaccttatcgatcagcttattcagcttgatcagcatatattgatccacttcgcggagatcttttacatccacggcattgatgcttggatcaaaatcgaacaggttgccgtgaaggaagcggaacgtgttgcggactttccggtatacttccgcgacctgcttcagaatatcttcagaaaccgggtgatcggcctgatagtttacggaagatacccataaacgcagaatttcagctccaagctgttttgcgatttttgtcgggtcaatcgtattgccgagtgatttactcattttacggccgtttgcatcaagtgtaaatccgtggcttaatacgcctttatacggcgctttgccggtgactgcaacagcggtggaaagagatgagttaaaccagccgcggtattggtcagagccttcaaggtataaatcagccggacggacaagatcatctcgttcttcaagaacggcctgatgggaagaacctgaatcaaaccatacatccataatgtcttgctctttcgtgaagattccgttcgggcttcccggatgtgtaaatccttccggcaggaggtcttttgcctctctttcaaaccatacgtttgagccgtgctgtttgaacagctcagacacgtgttcaatcgtttcgtcagtgatgatcggctcaccgttttctgcataaaataccgggatcggaacaccccagacgcgctgtcttgagatacaccagtcaccgcggtcgcgcaccatgttgtaaaggcgctgttcgccccactccggcacccacttcgtttgtttgatggcatcaagcagatcggatctgaaatctttaattgacgcaaaccattgcgcagtcgctctgaagatcgtcggttttttcgttctccagtcatgcggataggagtgtgtaataaactcgagtttcaaaagcgcgccgttttcttcaagcttctccgtgatcggtttattggctttatcgtaaaacattccttcaaagcccggcgcttcgtcggtcatgtttcctttttcatcaacagggcacagtacttctaagccgtacttttggccgacgataaagtcatcttccccgtggcccggggcagtatgaacacagcctgttccggcatcggttgtgacgtggtcaccgagcatgacgagtgaatctctgccgtacagcggatgttctgcagtgatgtattctaattctctgcctttatatgatgcgacaacttcaggattttcaaagccgcatgcctccgctacgttttcgatcagttcagccgccactacataacgcttgtctccaaccttgatgacattgtattcaagatcaggatgaacggaaattccgaggttggcaggcatcgtccacggcgtcgtcgtccagatgatgaagctttctccgttttccagaacgcctttaccgtctttcactttaaacgcaacataaatagacgcggaacgtttgtcctgatattcaatttccgcttctgctaaggcagattcacttgaaggcgaccagttgaccggcttcagacctttataaatatagcctcttttcgccatctcgccgaaaacgcggatctgctgcgcttcaaattcaggctgaagcgtaacatacgggttttcccaatcgcctctgacgccgagacgcttgaattgttcgcgctgtctttcgatctgctgccatgcataatcttcgcaaagcttgcggaaatcagcgacggacatttctttccggtttacttttttgtttttcgtcagcgccgtttcaatcggcagtccgtgcgtatcccagcccggcacgtacggtgcgttgtagccgctcattgatttatagcggacgatgaagtctttcaggattttgttcagggcatggcccatgtggatgtctccgtttgcataaggaggtccgtcatgcagcacgaatttcgggcggtctttcgtccgttcttgaacaagacggtaaatgtcctgctcctcccagtctttttgcatgtccggctcacgattcggcagatttccccgcatcggaaaatctgttttcggcattaacagcgtatctttgtaatccattttcattcctccacaacatttttcagaaaataaaaaaagccctctcatcccataagggacgagaaagcttatctcgcggtaccacccttttagaaaaaacggatcatccgtcttttcctctcgaacatcgtaacgtgatggaacgtcctttcctactctcggttcagaaaggaaactaaagggctgatctgcatgattccggccatcccgggctttcaccttccccggttcgctttatagcctgttttgagtcatgccggtccctttcaatcgtcttttcatctgaatttatgaacgtattatattcgaacgggccgaagaatgtcaagaaaatcagaaaattattctttttcctcaaataccgcgtcgacttcgtattccagcagatgatcccaatcatcgttcttcagcaggtcgagctgcgcttcaatcagcatttggaaacgtgttctgaagactttagactgttttttcagctcttcgatttccattgcgatttttcttgatttggaaagcgactcattgatgatgcgatcggcatttttttctgcttcacggacgatcagcttcgcttctttctgcgagttgcgctttacgtcttctgcggcttcctgggctacgagaattgatttattcagcgtttcttcgatattggcaaagtggccgattttttcgtccagctcgttcactttcgcctcaagctccgtttttttacggagtgcgatttcgtaatcttttctgacctgcattaaaaattcatttacttcatcttcatcatatccgcgaaaaccttttgtaaacgttttgttatggatatcattcggcgttaatggcatattgccacctccatttttacatttcagtacggttatctagttcacattataaaacaaatacggcacagatggagaaaaaaactgaaaaaacgactcatttttgccgttcaaatgtaactttccatttgtcttttttcgtttttccgtcaacttttgccaaactgcatcgtccgaagccgcgaatcgagagcatgtccccttcagcaacctgataagacggatcttcaatagctttccaattcaccttaacgagcccgtttttcacaagcgcctgcgctttctgccgggattgcctgctcattgaagcgcagacggcgtcgagacgcaatgaagaaaccgtgtcatcccttatttcgacatctgaagcgggaatgtgaagagcggaaagctcgattttctcaagctttaccggcgctttgcccgccttggtcagctgagtgctgacaaaatcggcgatttcaccggagacgatgagctgcacggcttcctctgagaaaatcagatcgccgtatttctgccgctttaagccgatccccattaatgatccgagaagagagcggtggtcaatgctgacgaatttttcagcgtattgaacgtcaaaagcccggagctcaaaatcatcctgttcaggttccatatattcagggtataaaatcgcgcgtttgcgctcagctctgtcatatcctccgaaaaacgcaagaccgcaggcgtcgccgataacggcttttacaatcacctgttccctgggatctaagaaatcagtcagcttcatccgatactggtccaggacaatctgtttccattcaagcacctgatcaataaaaggccgctcgtcttgtctgaagtgctggtaaatatcgctcatgttctttcctttctatgtaaagaggcttggctggtgccaagcccgtatcaaactgtcgcattcaagtatacattgcgatcatgcggtataggccccaaagtcccgtcgtggcaaaccgaagcacgataatcgctacaatcggggatatatccagcatggcaatgggcggaatgatccttctgaacggctctaaatacggttcgcaaatcgctgcgagaaaccgtccgaccgccgtttctctcgtactcggcacccatgacataaagatatagatgatcagggcaaacgagtagatgtaaattaaataactcagaacggaaaaaatttgataaagaatcatcctgctttaccacctctgatgttcgtcttcatttataagctccgaaatcgtgccggaaacgtcgacattatcaggcgtgcacagaaaaatatctgaaccgattctctgaatgtcgccgccgatggcgtagacggtaccgcttaaaaagtcgacgattcttttcgcctgatcatgctggatgcgctgcagattgacgacaaccgcccgcctgttctttaaatgatcggcgatttcctgcgcttccgcatatacacgcggttcactcaagaccactttagaggatttctgaacactttgcaagcttactacgttctgcttgccctgcggcttctgagcgtaagcaggctgtttatctttctgctgttcatgctcttcctgatgatcctgctccgtttcaatgtattcgtactcgtactcctcctcatccattgagaaaaagtttttcagtttatttttcatgctcatttgtttacaccccccggttcatttccgactaatgaagagccgattctgataaaagttgcgccctcttcaacagcgatttcataatcatttgacatgcccattgacagttcccggcacggcgcgtttgtctgattcagtttttgcacctgatccctcagatcacgcaattgccggaagcaggctctgatcgtttctgtatcgtctgtcaggggagccatcgtcatcaggccctctacagaaatgtttctaaactcagaaagctctctgataaaggggatgacctcctctgttttcaaaccgtgcttagacggctcaagcgaagtattcacctgcacaaaacagcgaaccgtatgctgcgcccgtttttcaatctcttttgccaatgacagtctgtctaaggaatgaatataagatacacggtcaacgacggccttcacctttctggactgaagactgccgataaagtgccacttcgggcttcctttgatgacttcctgcttatggataagctcggcatcccggttttctcccagacttgtaataccggcatcaacggcctcttgagccctttcagctgatacgtattttgtaaccgcgatgacggtaacatcttcggggcttcggcccgatctgttacatgcttcgtttattctttcgtttatatgtcgtaattgatcagcaacacgcaagatctaatgcctccttcattccgataaaggacatcatgcgtcccgttttccctttgtcgcggcggtgtgaaaagaatagttcatgctctcgttcggtgcataatccgctgactgaaatgttttcttccggaatgccgcaatgtatcagaagaagacggttgacctcttttaaatcaagctgatactggcctttttccgtttcgcatatggcggattcagccgtaaagggcagcgcccgcacttcattgatgacgcggtcgtcgactgtatagcttcccgcgctgatggacgaaccgatgacagcctgaatatctgttaaacgggagccttcttcgtttacccagcgttccgtcatgatgcgtccgatttgtttgaccgtccccttccatccggcatgggcagcgccgataatggatttcaccgggtcataaaaatacaagggcacacagtccgcaaaacaaagggccaaaaaaagattcgcatctttcgtgtagagcccgtccgtcccgcggaatgcggaagaatagtctctcgctccttttcctttatccccggctgtcacgcgccggacgcggttttcatgtgtctggtcggcgaacacccaggaatccagatcagtaccgcataaggacgctatgacttcacggtttgtcacaacatcatgagcttcgtcccggacgtgcaacccggtatttaatgactcatacggaggattgctgacaccgccgtttttcgttgtgaatccggcgatgacctttgtgttaagctgattcacacagttccagtcttctatcatgagtgccgaggggtggtaagactaaacgggtgatatgtattcatggagatccaacctttcgacaaacattaaaaaagcgtaatttcccactcattttaacacaattttaagcatacgtttagcggctgattgaaaaatgagataaataaatgtgccggaaacattgagatttccggctttttacaagtaaagggaggattacgctccccctttggttcatttacacgcactaagatgacatcttccccaattttaactatatttcgccaaggaatgatcatttcctcttcttttccgaaaaaaccgagaacttttccgctgccgcctaaaataatcgcctgaatttttcccgttgtcacgttaatatcaatatccccgatgcttccgagtttttttccgttcgacacgtttaccacatcttttatttgaaattcagatatgctgatcatccgtatcacgccctttgcccgttctttttcctattatatgaacggccgggctgaaccttgtcacatcgggcaatcttttttgcggctgcaccagccgagaataaatctcagcatgattttcgtatagtccataagctcatcaacggacacttcctcgtttacggagtgggcgttttttaaatcgccggggccgtatatgacgctcggaatcccggcctgataaagccatcctccgtctgttacggtttgggaaacatcaatgacgggctcctgttttatgacggcagagtgtgatgcagccaagacagaaactgccggatgatccggatcgatttccagcgccgggaacacctctcctctgtcttcaatcatcgaagatccgccccatttgaacaccggcctgttttctttgagccacagatcactgtcagcgacacgattaatatagtcttcgatttctgcggctgcttgttcgtgcgtttcgttcggataaaagtggacggtgatccataaccggcattcatcggcgacaaacgctgcgtgtcttccgccttcaatgacggcggggttgatcgtattggtgccgggcgcaatgccgggatagcttttcgttaccgcccagtggcgctccagctctcccaaggcagtgatgattttcgccattttttcgatggcgctcgctccgaatgtgcctccgcccgcatgaatcatattgcgcctcatgccgtcatgaaatgtttgtttgcttttcaattctatccagccggtgatgacaccgccctgcccttgaatatgcaggctgctcgtatccgcgacaaccgcaaaatccgcgtgatagccgcgtttgcagcattccagcgtccccgcctcgccgacttcttctccgattacagactgtacaatgaggtcgcccggaagcttaattgcggcatcatggatcagcttcagagagaaaagaacacacgccaacccccctttcatatcagcggcgccccttccgatcagcatgccgtcttttacgagcggctgaaacgggtcagagttccaatcttcgcccccggcttctgccacatcaatgtgtccgtttaaaatcaggctttgatgcctgcttgaatctgtcccttttaaaacaccgactacattcggatcttccggatacacatcccacatatcgaccgagcagcccgtttcttttaaaaagccggccacccacttttgggcttctgccgtatttcttgctggcggggccggagtgggaaaggcgatcaacctttcagcaatatgtatgaagtcgtgcctccgtttctccgcctgttgtaacagcatatcaatctgatgcattggaaatctcccctttagctgtatcaaaaaacccgtttcattaaaatgaaacgggtaaaaaacggatcttcctccgcttttttcaccgcttccctccgccggcatgatccggatcaggtccgttaagggttgagacaacgtctctctcagccgcatggcagcacccccagggtgaattgatgttattttacggttgatgcctcttttgcacgtgttaaaaacgggcggccattgttccataagacattgacaggcgtatcgaaaaacgctgtaagccgctcgtcagaaagcatatccctgattttcccggaggcgaacacctcgccttgttttaaaagcagcgccttatcaaataccggcagaatttcttcagcgtgatgggtgacataaaggatggacggcgcattttctttttcggcgatcgacgtaatcgtgtccagcagctgctcccttgccataaaatcaagacccgtcacgggctcgtccaaaatcagcagtttgggatcagccataagcgcccgcgcaatcagcgctctttgtctttccccttgtgataatgtttcataccgcctgtcggcgtaactgatggcgcccaaatccttcagaagaccgatcgctttttcccttacctgctcactcggagtttcgtacagcccgattgaggcgtacgcgccgctgagggcgatttcaaaagcggagtccgcggcatataatttgtgctgaagacctgccgaaacaaggccgattttccttctgagcctgtcaccgagctctgttttgccgaactgatggccgagcacctgcatctctcctgaagtggggaagtaataagagcataacatattcagcaaagccgtttttccggctccgtttaatccgtacagcacccaattttcgtttttctcgacgcgccagttaatatctttcaaaatccatttcccgtttctttttaatgacacactgtccagctgtaaaatcattgccgtttcccccgtttactttatttaaattttctaaaaacttttacacattagaatacatcacttttttgcaaacgtaaaccatcgcatgaaaaaagcctttaaacaaggtttaaaggctttttccgttattgatggatattcttattcatttgtttaatggctgccttttcaagccttgagacctgagcttgggatatcccgatttcttcagcgacctccatttgggttttcccttggaaaaagcgctttcgcaaaatcattttttcccgttcgttcagtcttctcatgccttctttcagagccagctcctcaatccattgtgtatccttgttgcgctcatcgctgatctggtccatcacgtagatcggatcgccgccgtcattataaatcggctcaaacagtgaaaccggatcctggatggcgtcaagggcaaacacaatttcttcatggggcacttcaagaactttggcgatttcctctgctgtcggctccctgcttgtctcactgattaaccgctctcttacttgaagcgctttatatgcgatatcgcgaagcgacctcgagacgcggatcggattgttatcccgcaaatatctgcggatttctccgatgatcatcggtacagcgtatgttgaaaacttaacattatggcttaggtcaaaattatcaatggatttcattagtccgatgcagccgacctgaaataagtcatcaacatactctcctctgttgttaaacctctgaatgacgcttaagacaaggcgcagattgccgtttacaagcttttccctcgctgaatcatcgccctcatcctgcaattgcctaaacagctttctcatctcttcattcttgagcaccggtaatttggaggtatccaccccgcaaatttcgactttatttcttgacacgtttttccctcccactaggagctgctgtacaacgttaagtatctcctcgggtgggaaaaatatgcaccgctattttacagaaataaacatccggcggcggcaatccttgcagcagtaagggctgtcagatggaaaaaattttacaccattttgttaaactcttttctcagtcttttgataatccgcttttcgagccgggagatataagattgtgaaatccccatcatgtcggctacatctttttgggttttttcttcttctccgacaagcccgaaacgcagttccataatctgcttttctctttcgtttaattgctcaagcgcttttttcaaaagttttttatccacattggcttcaatgtctttcgtaataatatcatcatctgtgccgagcacatccgaaagcagcagttcgtttccgtcccaatcaatgttcagcggttcatcaaaggacacctctgaacggattttattgtttcggcgcaagtacattaaaatttcgttttcaatacatcgcgatgcgtaggtggcgagtttgattttcttttccggattaaacgtgtttaccgctttgatcaaaccgatggtgccgatgctgattaagtcctcgatattgatgccggtgttttcgaatttgcgggcaatgtaaacgacaagacgtaagtttctctcaatcaggatggcccgcgccgcctgatccccgctcggcagctttaataagagcacctgctcctcttctttagacaaaggcggcggcagcgcctcgcttcctcctatgtaatacacttcatcgcttttcagtccgagtttcatcagccatttataccacaaatatgtcagacgcagcttaagttttttcatcttcctcccccttctaaataccacgcgttttgagtatgatgaataacagacttttcgtcaggaaacatgttttacagccttccctgtcagcatcttcggatgaacgattccgtcaaattcaccgtcagcggataatggcttcgtgctgatgccgatcaggcatttttcacatgcgatcatctcgtcttttgttaaaatcgtgacgtaatccggctttaaacagagtaaaaattgattgtcctggccgacgcccctgtatggaatcagcctcagcttatccgcatggcggaacgaatcatcaagctgctctatcacttcaagcggactggcggatttgatgaagtccgtttccttttcgctgaggatcggagcgaatttgttaatgtgaaggatcatgaccggcgttttcgtcagcggatcatacagctgattcccggaatccaccaatcctttcgcgcggattgtctgtccgctgaattccgcctgcaccatgacaagttcatcgtactgaatggacttcgtctcgatgtcttcaattctctttttcgaaaaaaaccatatggccggaaatccgataactacaaacatccagctgatcgggtcgccgaatccggtctggcttgtaaccattacgccttgctgcacaattgattctgtctgcagcagggaatgtacgccgatcattcccccgccgacgagaaaagtcgcgaaataaaaggcgaacaaattttgaaaaaagtatcggaaccgtttaaagccaaaagccgtaagcacgatgactaccgaaaacgccatttttcccgccggatgctccacaaagggagaaataggcgtaaacatcagaagcacaatggctgacccgatgaaaccgccggcggccactcttctttttttcacctggcgttttaaaataaaggcggtcaataaaagcaaaagagaatcaaaacaaaagttcaacagccaaatgacatccagatagattttcacatctgacccctttcctcttttgtcttacatatctgtttctctctcttgtttcataagtataaagcaagctctgtgggaaagtctgtcaattaatgttgagggtaaagtacaatttttaagggataaccgttttatttgtcgagggccgaaaaggttgattttctattgtccccttcaactaaaaaagcgctgccgtgatttggcagcgctctgtttttactcattgatataaagttttcctttagccgtctgtctcgtttcatttccgtagtcatctcttgcgataacgtcaatttttgctccgcttgctttgatggaagaagccgccgtccagtaaccctcatatcgtcccggagaaatttctctcagcggaagctctgttgcgttttggctccctgcccgggcgtttgtcagaggcagacggatcacgaaggaagcgtctaatttctttccgcttgaaaaagcgattttcactgattctccggcttttaattccttatccgctccgggaaccaatccggaaatgacgggagcattgtaattgacatcgattaccgtctttttcgttgttttgttaccagcttcatctgaggccgtgaccttgatctcattgctgccgttttccagaagggttctcgcttgataagaaccgttatttacttcagctttttttccgttcacctttacccattttaaatgggcgtcgtgcacttttccttttacagtcactgcttctttatttgttttatcaccgtttgccggactgtcaatcgtcacatcaggcttatcctcatccagtatgaccgtgacagggcgtgactcgtcggttgacccgctgtctgtcacagatgccgctgtcagccgattgccatctttagtgagtgtgacaccggcctggaaactgccgtctgcatctgctttcgtttctgcggcggttttaccgttattggtaagacggacagcggtttttggtgaagccgttcctttcaccgtgattgacttcttgtttgtaaatgaccggttttcaggcgacgttatctcaggcacagaagcttcgtagtcgaccaaagccctgatcataaagtttccgtctgttttatcggcttttgaccagcggccgtcgaggtattgccagtttctgttcgagtacgggctgccgtcatcagatgacagggcaggtgtataaggatcgggtttcgtctgacggaacacaagataaaaatcctttccgaccgcgattccttttgagctgagatccactttggtccactcgccgtttcgaagcgcttcagcttggaacgggccggcaattttgctgcccggagctccatcagggccggatgcatcatatacttctgcttgaaattcggtaccgcccggatcaggccagtcggcgccccaaaatttaaaaaggcctcccgtcagcataccgtgttcttttccgtctttgagggtcatcttaacggcagatttgctgccggctttaaaatatgacagcgcggcttcttccgtcccgttatcataggcgatttccccttcataaccgacatacggcttaagcttgacgtttttttcagcatctcctttgatgtcgacagaaaattcgctattgtaaaagccttttgccgctactttgattgtgtaggagccttcatacgccttaagcgaatattcccctttatcgtttgtcaccgccggctcaattgcggcatcctcggccacataaagcgcagccccttttaccggttcgcctgtggactgattggtgatggttccttttagcgtgccggacggcatttgctccagtgtaaagtctgcctgtgcggttttgtctgattgaatagaaacttgtttcgaagcggacttaaatccgtaagcctcggctttcagcgtatagcttcccgccttatgtgacaggctgtaacttccgcttgcagggtcggaatatacggatttccccgtctcggcgacactgatttgcgctctgagcggcaggaggtttgtttcacgtttcactctttttccgggtgatttcactgccggtttggcctgtttcggactgatggcttttttcttcaggtggccgggaggtgtttgtctattgtgtttactttttttagccgccttgccgagagggctgcttgaaagccggatatcatcgatataccatccgtcttcattgagtacttcgtcagactgcatattaaacatgagctttatgttttggcctttatacgcagataaatccgcctcttcatcattccatcctgcggaatcaccattgtaaacggccgcctgctcccaatttgatttcccttccggcagaacgaacacatacccgtaatcaaaaaattcttcgagcttgtgccagcttttaaattgtaaaaacagccgccctgtttccggaacttgaatcggaggcatcacgagattcatgttggccgaatcggcataagggccggacagattcgtcgcatacactttatctccggaaaatgcggcgccgggccctgaacccgggataccccattcccattgatcatgtgtcccgtaactggaccagcccgccggctgtgattcaaaatcctctttgtatcccgccgtaatgctcggtttcacgtcagcccggtacgtatcagattctacagaatgacctccgaaatcttttatggtccatttataacttatcttgcttcccgttatgtccggaatctccgcctggtatgttccctttttttcatcaccgcttttttgaacggcggctgtcgttttccactctccttcatcaaactgataggagaggatcacctcagttatgcttacatcatcttctgctgtaaccgttaacggaaggtttgcccctttgtaagcctctgagaccggttcatgatgaaagctgggcggattgtgatcttcacccgcagaagataccttgccttctacgcttccgattccgtccgttacggcagaaacggcatcaaaagcgttaacgaggccgtggccgtaaccgttattcggtgattccggaaaaacggaatctgtcagcttttcggcggtgcgcgtcagaacgtcttccatttcatcgaccgtaatagaggcgttcgcctgccttaacaaagccgccgtcgccgccacatgcggcccggccattgaagttccgtcccagccgccttcgtatgttcctccaggaatagaagaacggatattcacgcccggagccgaaatgtccggttttgtttcatgatacggtgagggccttgaagtgagaaatcagcgagtttcttgtcgatgtcagtcgcacctgtcgcaaatgcttcaggataattggccggatttgcgattgaacccggtcctcccggtgtaaataagtcttcatttcccgcagagaattccggaaaaatccctgccgctctccacgcattcaccatatcgcggtaccactcgtccattcccgaaccgcccgcccaggaattattgacaacatccggcgccatctcgggatgcggcgtgccgtttttatctttaggcgcaagcacccattcaccggcatccaaaatatcggcatcggttcctccgtcatctgaaaatgcttttactgcgatccatttcgcccccggagccacaccgatttgatttgagccgtcaggttctgaacccgtcatggtccctgttacatgagtgccgtgttcaagatcgtcgtagggagcgtctttatgggacacggcatcataccagttcatttcatgattcggcgctgctggattttcaggatcgtaaccccggtatttttccttaagcgcgggatgatcccactgaactcccgtatcaatggaggcgacaaccgtgccggttccgtcgtatcctgaggcccaggcctgcggcgcatcaatttggctgatattccattcgatgccttcctttgctttgacctctttttgttttttcttcatttgaaaaggagcttttgattgccgttgagtaagctgacgtttttcattcggaagaactttttctacttcaggaaatgaggcggctttttccattacctctttcgaagcagtaactgccattccgttgacaatataataggaatggatgtgatcagcctttcctttctttttttgtttttccaaatatgttttcagattctgctgcgcatcatgagctgccagttttaaagaagaaacaacggctgaccgcttttgatattcggtttttgctgcggaaagcgaatgagactcggcatttttttctgcttctttgaccgcttttttcgtattggctttctctttaaatttgataagaaacgtgactttatcatttttttcaaaacgcttcttgactgaatcggaaatcttatgctgaatgctcttagaggaagaaagatctttggtaaaagaaactgcccccggtgtgctgttcgctccgactgcccccggaaacaacagtgaactgacgacaatcgcgcttaaaacggagcctgtccatctgtttctcgtttttttcttcaatcgtatccccccttatttggtaacgccctataaaatgtgtatccctccttcataattggaatcgtttgtcatttcgatgctgtacgttaaatgtagacaatcttccatccagatattgtcacattctgtagaaagccgtatgaaacttaaaaacaatcaattcgtcataggtataaagcttcttttttcactgtatagatcatgggggataggaaggaagactgtgcacaaaaaagaaaaaggacaaaaccatgtggtcttgtccttttttacatcagccgcgtttgttgcggtttcttaaaaatgtaggaatgtcgagggcatcatccgccggttgtgatgtatggcggttcaccgtgttttgatgctgtgtttcttctcgtttcggctcacgtttcgcagcattttggctttgagacttcaatccttggtttaaagtcggacgctgcggttttgagtcatctttttcctgttcgataaaaccggtcgcaataacggtgacgacgatttcatcttttagattttcattgataactgaaccgaaaatcatattgacatcagggtcagatgcagaagcgacgatgtcggctgcttcctgcacttcgtagaggctcaggtttgtacctcccgtaatgttcatcaaaacaccttgcgctccgtcgattgccgcttccagtaacggactggagatcgcctttttggcggcttcagcagcacggctttctcctgtagcgatcccgatacccatcaatgctgaacctttgttggacatgatggttttgacatcggcaaagtccaagttgattaaaccaggcgttgcgatgaggtcagagataccttgcaccccttggcgaagcacgttatcagcttcacggaatgcttcaagcatcggtgtgtttttatcgacaatttcaagaatgcggtcattcggaataacgatcagtgtgtcaacggcttctttcattgccgtgataccgcctgcagcctgcagctggcgttttcttccttcaaatgtaaacggtcttgttacgacaccgacagtcaaagcgcctaagtcctttgcgatttgcgcgatcaccggtgcggctcccgttccggtaccgcctcccattccggctgtaacgaacaccatgtcagcgccttttaacgcttcttcgatttgttccttactttcttcagcggcttttttgccgacttcgggattcgctcccgctccgagaccgcgggtcagcttttccccgatctgcattttcacttccgcttttgacaggttaagagcttgcgcgtccgtgtttaccgcaatgtactctacaccctgcacttcattttcaatcattcggttgaccgcgttattaccgccgcctcctactccgattactttaattgatgctaagccgtctatgtttgtttcgaaatccaacatgctaaatcctcctaatctgccgaatgactatcaatctattcccaaaacatgcttaatagttttttcattttgctcggtttgttgtgttcggcttgtgttttttgttttgcttttggacgctgctgcgcctctggccgctgatgatgttcttcttcgtgagagaccgcgatttcctgcacggcttcttccggcatatgaaagcctatttttcttccctgaattctggcatttcggcaggcaaattgtatcaagccgacacccgtcatatactgagggtctcttacaccgatataattcgggcttgcgacccttacattgtgcctcagcacttcctgtgccaatgaaagcactccgggcattgcggcctgtccgccggtcagcacaaagccgccgggcagatctgtaattcccatatgctcaatttcggctgcggcaatctcaagaatctcttccactcttgcttcaataatattggcaatttcctgctgtgtaaaagattgcttttgattcgttcctatgacggtgacttcaaatacttcatcttctgaagcctcatcgtagaatgcatgtccgaattgtttttttactctttcagcctcttcggtggaagtgcgcaatccgatcgatacatctttcgtgatgttttcgcctccgagcggaatgacggctgtctccttcaggtgccctgttcaaataccgccaccgtcgtcgagccgccgccgatatcaatcatggcgactccgaggtttttttcgtcttttgacaaagccgccgaaccggccgcaagcggctgcaggcagatatcagtaatttcaacgcccgctctctccacacagcgaagtaaattatgtaagatcgttttggagccggtaatcagcgtgccttctacttccaggcgcactccgagcatttttttcggatcggtaatttcgtctcttccgtcaacgataaactgtttcggaacgacgtcaacgatcagctgctcatgcggaaccgacacaacctgtgccgcttccattaccctgcggacgtcttcaacgtgaatttctttgttttcactggaaacagcgacaacgccgttcgtatcttgaatatgaatataatttccattaacgccgacaatggcttttttcagcggaaaacctaccattctttcagcttggtcaaacgcttttcttatagaatgaacggtttcatctatatcaacgattgagccttttttcaacccttcagacggtacatttcccactccgataatgttaagggaatcatctgtcatttctccgacgatcacttttgtattggacgtaccgatgtcaagactgacgtaaagttcattgttgttcattctatggcacctcctcacatttcgatcaaattctattctattatttgcggaacaacaatacaatgaatgtggctttacaagtgtgtaacaaaaacaacagcatcaacaaattcttatctgatttctcacaatttatgtttaatgaaactattcgttatattctatgtatatcctcttttatatcgcattttttttattttttttagagacggcccaccttaccgtaagatttcctgtcacggtgccataatgtgcaaaccagatgcaaatatacccgctttccattagtctacactaagatgaacctccagaaaagctatagatattgccagaaacatccgaaaaaagaagaaacaggaggaaaattccaaatgcaatgttcattgaagaagacacgcccattgcattgagaattttccccttgtccggcagccatatcccgggcaaaaacaaacatagtcataattattccgctatcggttatatcggctgccccgctgattgtaatagattcttttgaatcaccttaaaattagttctttagaactattaatcattttcttttttcttgccggatttacctttgttaaattcttcaaaatacgtagcgacttctaagtggataatcccctttttcccgccgtccagctgggaaacgatagaaggataggtcttcatccggtcggcaaatgttttaatagaagcggtaactacatacccgtcgttcatatacagcttgatccggtcctggtccatttttaccggtgtataatagatttcagaaatcgactgctttagcgaaccggaaagcttatcaagctgctccgccattttgacccgctttttcgcgtttgtccagtcaaccaaaatcgggcccgcgtcatccggcgtgacttcgttcggcagcacggtgccgttctccagcacttcataatacacatcattccgctgcagatacgcgatcgtcttgtattcttcaatgtgaatgctgactttattaggaaatacttttgaaagatccgcctttttcaccagtttattctgctcaatcttttcttctgtttttttcttgttcagactccagaactcggtttgtccgttatgtatatcagaaagcgcgttgatctcttttacagacacgttttcgttcccggaaacggtgacagaagacactttgctgatcggcatctgcaagtacacgatgatcagcaccatcataaaaaagagcacaatgaatgaaatcagccggcggtttgctttttgtttccgctgctctttgattttcggaatccgctcttcaatatttacgattttttctctttcatgatttgggttcactgcctgtccacctcactaagaatgaaacagcttgacattcgtctgattgaaaaacaaacggcatgctgtgatgccgtttgacatttgttaaaagtatatcacatgagctcatggaaatcagagaaccttttaacgattccctccgatgatttcaacttccgtatgcatgtcaacatcatactgctcacggattgtctttttcacatactcaatcaggtcgagaacgtccttggcagtcgctccgccggcattgacgataaaattcccgtgcatttcggatactttcgctccgccgatctgatgtccttttaatcccgctttttcaacgaggtttccggcatgattcggcagcggatttctgaatatgcttccggcgcatgggcttgaatacggctgcgtattttttctgtaatctttgttctgctgcatttgcgccgtaatggcttcccgttccttttgctcaagctgaagaactgcctcgagacagacgccggggcgttttttctgcaaaacagacgttctgtagctgaaatccatctcttcgtttgtcagccattcgattgtgccgtcttcaaataagatacgcgctttcacaagaatttcactcatatcagatccgtgcgccccggcattcatatagacggccccgccgattgatccggggatgcccgctgcaaattcgagaccggacattccttttttactcatggaagtcgcaagccggacgaccgaatagccgcctccgaccgtcacctgatcaccgtcaatctccaaatgatccagacccgcgcccagtttgatgacaactcctcttatgccttcatcaagcacgagcagatttgaaccccggccgataaccgtccatggcagatcatgtttcttcacaatatccataatatctttgaccgcttccacactgttggggatgatcaaaatgtccgccgggccgccgattttcatcgttgtatggttcgcgagcggttcttgttccagcactttgccgacttcgcggtctcttaattcctgaattacgttctccatcataaacctccgcattccatttgctctatttttttatgtcttccatgatactgtacagtctggctgccgcatccggaacaccgagtgattttgtccgctcactcatgtcttttaaggtttcttcattcatgacgattttgtccagcgcagcgatcagtttttctccgctgagctcggtttccttcagtacgattgcagcgtcatgctggctgagcgccttcgcattgacttcctggtgattggctgtcacatacgggctcggaataagcacgctcggaatgccgagagcggtgatctccgcaatcgtcgtcgctccggctcttgccacaatgacatcaattgattgtaagtactccggcatttggtgcaaaaacggttttgtcaccatattatcagcggcttttccgcctttcagctcagccgttaccttctcgtaatgcacttccccggtaatataaagcacttggtaaggtctcgttttcaattcttcctgcatatctatcacggcacggttaatgggagccgcgcctctgcttccgccgaaaatgagcaccgttttttgattgtctttcagcccgaactcagttaatgagcggcctgtcttaattgagacgacttcagaggctctcgggtttcccgtaaacacaactttttcagcaggaaaatgcgattttgcttcttcaaagcaaattgccaccttattaacatatttcgagagaaacttatttgtgatgccgggcaggctgttttgctcatgaatgatcgtcggaattcccatttttgccgccgcgtatacgaccggaccgcatacatagccgcctgtaccgataacggcatccggtttaaactcttttaaatatgatttgcttttcttcacgccttttaagaaacgcatgacggtttttacattttcaaaagaaagttttcgtttgaaacctgtaatttcaatggcgcggaacgggatattttcccgttcaacaatttttttctccagaccgttctctgttccgatatacaaaaattccacatccggatgccggcgctgaacttctttaataaaggccagggccggataaatatgtcctccggttccgcctccgcttactgcaatacgcattcgtatgtcccccttaatcacatagcgataaccctgttttttaggacagggttattgatgttgtctgtttttttatagataacgaatagatcatgagtgatgaggcaagatacagatcaatacctcgagtaccggctgacatttaaaagcacgccgaccgctgcgagcatcagcgtcagtgatgagcctccgtagcttaaaaacggcagcgtaattcctgttaccgggatcagccccgtcacaacgccgatattaatcatgacttgaatagctatcatagaaataataccgatggcgacaaagcttccgtataaatccggcgcgccgagggcaatcctgacgccccgccacaataaaatactgaacagcagcaatatgagcgaaccgccgataaagccgagttcctcagataaaatagcaaaaatgaaatcggtttgcggctccggcaggtaaaaaaacttttgccggctttggccgagccccatcccgaacagtccccccggacctacggcatagagcgactgaatgatctgaaatccgcttccaagcgggtcctcccacgggtttaagtaagaggtaatccgtttaatccgataaggagcggacagaacaagcgccgcaaatccgcttaaaccgatgagtccgaggaacgcaaaatgagcgattcgcgcaccggatacaaaaatcatcacgatgcacgtgcccaccattaccgtccccgttcccaggtccggctggcacataataataataaatgcagaaaacacgattccgagcgcgggaacgaatccgcgtctgaatgacgtaatattcttctgtttttcagaaagaaatttagccagaaacgcaatcatcgcgagtttcataaactccgaaggctgaatgctgaacgctcccactccgatccagcttcttgaaccgttccgcaccattccgactcccggaatcagcacaagcacaagcagaaaaaaacaaatgatcagaagcagcttcgaccatgtgcgccatgtccaataatccacattcataatgaaaaacatggcaatgacgccgatccccgcaaacagcagctgccgtttcgcgaagaaaaacgagtcgtcaaatttataatccgcccataccgcacttgcactgtagaccataattaatcctattgttaaaagcaataacgtaatgataactaataacaaatcaggcgctgtttttttagtagtcaaagcaatcgacaccccaagcataagtcatttagggctgccgatgaacagagacaagcccttacttaagcatatgcacggcatctataaacatgtcaccgcgttcttcaaatgttttgaactgatcccagcttgcacacgcgggtgacaagaggatgacgtctccttcatttgagagcgcaaacgccgcagatactgcttgttcaacattatcgacacgtttgacatgttgtattcccagctcattgcccagtttttctatcttcggcgctgtctgtccgaacgtcaggaccgctttgacattgtccatatacggtttcagatcgtcaaaaccgttgccgcggtccagtccgcctgcaagcagaataaccggtgctttgaacgcggagagcgctttgcttgtggccaaaatattcgtcgctttgctgtcattataaaatttacgattccggattgctgttacatactgcagacggtgtttgacaccggtaaagcttgtcagcaccttctgaatcgctttattagacgcgcccgccgtttttgccgcggctacagcggccaatatattttctaaattgtgcgcgcccggcagcacgatgtcatcaacaggcagaatcgcttcatcgccgaacatcagcattccgtctttaataaatgcgccgcttgacagttcctggtgcactgaaaacggaacggtgccggcttttccgctttcggcaagccgcacgactgtttcatcgctttgattcacgatggccgtatcactctcaagctgatgaagatacacgttctgcttggctttttcatagttttcacggctgtgatggtaatccaaatgagcgtcgaacacatttaaaatcaggccgatttcaggtctgaacgcatgagtccccataagctggaacgaagaaagctctgtgacgatccattcatcaccgtcagcatgataagccacttcactggcgacagtgccgatatttcctgcgatcagcgcctttatcgagtcagctttcagcatttcataaatcagggtcgtcgttgttgttttcccgtttgaacctgtaatgccgatgaattttgcattggtgatataatacgcaagctcgatttccgtccaaaccgggatgcctcttctttgcgcttcctccaccatgatattttcatacgggattccgggatttttgatcagaatggtaatgtgatgctgatcaaaaagtgacgtcggatgctcaccgcagatgacctcgattcctctttctgaaagcctttgggcaggttcgttctcttcaaaggctttttgatcattcacgacgacgttaatgcctttttcatgaagaatcgacgcagccgcatatccgcttttcgccagtccgaggaccagaaagttttgttttcgcaaaaaaagttcgttttccacttataaccacacctcgatgtaaattcctaaaacggcaagcagcagtcccgcagtccagaatgtgacgacaactctccattcagaccatccgaccaattcgtaatggtggtgaagcggactcatcttaaagattcgttttcctgtcgttttaaagctgatgacttgtaagataacagataaggtctcaataacaaaaactccgccgataatgacgagcagaatttcaagcttcgtcagaatggcaacggtcacgatcgctcctccgagcgcaagcgaaccggtatcccccataaatactttggcgggatgggcgttgaatacaagaaaaccgagaacggcgccgacaacggcaaccgagaaaatcgcaacgtcatattgtgactggttccacgcaaggatggcgaaagcgccgaatgcgatagccgcggtaccggacaagagaccgtccagaccgtctgtcaggttgacggcatttgaacctccgacaagcataaagagaacgaggataaagtatccccagccgagatcgattgacagatgtgtgcccggcaccctgatgccggttgaaaaatggcaataatgatatactccgtaaaatacaatggcaataatgatctggccgatcaatttctgcttcgacgtcaatccgagattccgtttcattactactttaatatagtcatccagaaagccgagcaggccgtatccgatcgtaacaaacagcagaagaaacatttccgcgctcagatgcgaaaatttctgcgtcatgacaatcgccgtaatagcgatggatacgataatcatgaccccgcccatcgtcggcgtccctgattttttcatatgtgatttcggcccctcttccctgatactttggccgaattttaaacgtcttaaaaacgggataagaatcggagatatcagaacactgattaaaaatcccattattattgtaaataaaatcacttgctcaagcattgctcttttctcctcccgtttcgttcaaacgacatacgtatttatcatattcacattgtgtccccgtaattcttttcatttcactcattctaacactctttcctgttttactttttattcagctcaacaatagctcttcccgctacttcggcgtcatcaaagtcgaatgtttcattgccgatctgctgataggtttcatgccctttcccggcaatcagaaccacatctccctttttcgcgttggcaatagcaaaaaagatagcctgctcgcggtttgcgatactgtgatagtaggtgccttctacccctctttccatatctcttaatatggccagcgggtcctcgcttctcgggttatctgaagtgaaaatcggttcgtcggcaatccgcaccgcaatttccgccattttcgggcgtttcgttttatcccggtctccgccgcagccgacgacgacgaaaagcttgccctctgtcatgtctttgcatgtattcagaacgttttccagactgtcaggcgtgtgcgcgtaatcgacgaccacaggaaacggctgattatgattcaccagttcaaaccggcctctgacaccttgcagctcttcaagagcgctcgtgatcgtatcaaacggcagacccgctgcgatcgctgtcgccgctgcagccagtacgttatacacgttgaagcggccgacgagtgaaaccgtgatctgctttgttccttttggcgtaacgagttcaaaatttgtgccttgcgcagagatctcgatttgtttcgccatgacatcggcatcgttctcgattccgtatgtaaggatgtgcgccgccgtcactttttcaaaataagcactggctttgtcatctgcgtttaaaacggcccgcttcggcttttcatggttaaaggagccgcccagctgggaaaacaggaggcttttagcctgtctgtagtcttccatcgtcttgtgatagtctaaatggtcctgcgtcaggttcgtgaatacggcgatatcataatcgcagccgtgaaccctgccgagtgacagagcgtgagaagacacttccataatagctgtgtcaacatgctcatcattcattttcttgaacgttttttgcagtgtgacgctttcgggcgttgtatttttgaccgggaatgtctcatccccgattttaatgtacatcgttccgattaaaccggtctgtcttcccgcttttttgaaaatctcatcaaccatgtgcgtcgttgatgttttgccgtttgtgccggtgatgccgataagctgaagctgctttgtcggctgcccgtaaaacgcgtcagaaagaacgctgagcgcccgctgtgaccggcggacgataatgacaggaacatcgacgtcaagctctttctcggcaacgatggccgctgcgccgttttctgcggctttttgggcgaaatcatgtccgtctaccgtatacccttttatacacacaaaaagactcccttttctcacttccctggagtccatctcaattgaagttatgtcagggtcatgaaagtcattttgaacaggttcggccattaaatatgtaagcagctttgtaagtttcattgtatcaaacctctcagaaattctattcattcttttatcatgataaccgtttataaaagtcagaatggcttttaaacatacagttcatattttagcgtaaataaaaggatacatccagttaatcttaaaagttatcttctttttttctctttatgataaaaggcagccgaaaacaatcggctgcctcaaaaagactcattcttcactcaagtaaacacggatctttgagccttcttttactttcgttccggctgcaggtgattgtttcacaattttgcttccttttcctgaggagtcaatattcaaattgacaagcagcgactcaagatcagagacagacatccctacaacattcggaacctctattgtttttgtgtcgttccattgatattttttctcgatttgattttttcgcggtttcacgccgagctccggcagactgtctctcatcatatttccgacaatcggcgcggcgacggttcccccgaattgaatcgtgcctttcggattatcaaccgcgacatacacgacgaggctcgggtcatcagccggcgcaaaaccgataaaggagacgatatggttgttttcgagatatttgccgtctttgaccttttgtgcggtacctgtttttccgccgacgcgatatccttccacgaaggcattccgccccgttccctgagcgacgacgctttctaaagcatatctgatctgctttgacgtttcctgggaaataacttgccttttcgcaatcggcgattgtttcttaactgtttttttcgtaacgggatcaacccactctttggcgataaacggagtataaagcgttccgccgtttattgctgcggaaacggctgccacctgctgaatcggcgtgacggaaaccccttgtccgaaagcggttgtcgcctgttcgaccgggccgactctgtcaagcgggaataaaatccccgttccttccccttgcagatcaatgcctgttttctttccaaagccgaagtccttaatatattgaaacagcttttgttttccgagccgttcccccagctgtacaaacccggggttgcaggaattttgaacgacttcaagataagattgcgaaccgtgaccgccctttttccagcatcggaggcgggcgccgtcaacctcggcaaatcctttgtcataaaagtggtctctttgcaagtttactttttgctcttggagagccgccgcaagcgtaataatcttaaaggtcgaacccggttcatatgtgctccataccggcaggttccggttgtaaacggacggatctacggattgatagtcagccggatcaaaatcaggacggcttgacataccgagcacttccccgtttttcggattcattgcgaccgcaatcattccgtccggattatatttcgccgctgcattatcgagctctctttctataatcgtctgaaccttggcgtcaatcgtcaatttcatatcaagtccgtctttcggaggggtgtaatcatccgcttcatcaggcattttcttccccttggcatccgtataaaatttcactgatccctttacaccttttaagtcatcatcataataagcctccaatccgagaaggccctggttatcaatacccgcaaaaccgagaacatgggacaaaaagcttccgtacggataatggcggatgctgtcttcagccacataaaccccttttaagtcgagcgctttgatttctttcgcttttttattggaaattttccgcccctcgggtgagattttttctatggaggttttcttagtaatgtgtttgtagaccttctcttccgacatatttaaaactgacgcgagaagcttgcccgtttttatgggattttgaatctggcgcggtacgacaaagacggtcggcgcgcttttattcgtagccagcttcacgccgtttcggtcaaggatttctccccgctcaggctcaaacggcaaattccggctccaggaatccttagccagtgaagtcagcttttctcccatcacaaattggacatagcctaatctgctgtcaatgatcaaaaaaatgattacgccaaaaagcaaaaccagtaataaacgttttcgaaccgttacatttgaaacgcgcaagggaccgtccactccttatttaggcttgtttcaatttatgcctcagcttggacacatagaacggcggcgcataaaaaagaagcccgcgggcatccgcggacttctctgtcccgttaatcaggatttttaaatttcaccttgatcacggtattttctttcagttctttgccttttttcacactttggcttgaagcgtaaccttcaccgctcacatcgatgtgaatgcctgatactttgctgaattgaagcacttcccgtctcgaccatccggacatatccggcatcgtcatctttccgtctgtttttaagaagattttctgattggtgatcacatcttctccggctgtcggatactgctcttttacggcaacatcgctgccgatgacaatcggtgtgagatgttcatttttcgcttccttctcagcgcccgtgactgtcttatctgtcaggtcaggcatcttttggcttttcgtttcttcctgaccggaatctgttttttccgtcggttcgatattcatgtagtggaggctgtttttcatcgtcgggttaaagatttccgcgacaggatcagagctgctttgacccgcttttaactgcggctgctgcacggctacatagatgacgagcttaggatcatttttcggcgccatgcccatgaatgaaaacacatagttgctcgttccccttaaatatccgcctgtcccggcgatttgtgcggttcccgttttacccgcgacgtcaaaaccttcaattttataaggttttcccgttccgatgtctgacgtcacgacttctccgagcaggttccggacttttttcgccgtatcggctgaaatcggcgtgccaacttgctccggttttgtctgcttgacgacttttttcgtatcggggtcgacaatatgatcaatgacgtaaggtttcatcattttgccgttattggcaatcgccgtgacggcctgaagctgctggatcggtgttatcgccgatgcttggccgtaagccgtagacgctttgtcaaaatcatatttgtagttaattttacttgatacttcaccgggcagatcaatccctgttttttgatagagcccgaatttgtgcaggtactcattaaaccggtcaaaccccagtttttcgttggccagtttggcgaaagcaacattcgatgacctcatgaggccgtcatggaagcttgtcataccccatccggcgccatcgttccaatctttaacaggtttgcctcccactttatatgttcctgatttatatttctcgtttgcggaaaacacattttcctgaatcgccgcggcaagcgtaaagatcttcatcgttgaacccggttcatacgcgtacgacactaagtcgttgtaataattggtgacgtttctgatattcgggtcaaaactcggacgctgccccatcgcaagcactttgcctgttttcggttctacgacagccgccataatttttttcggtttatatttttccgctactttcgtcatgctgtcttctagaaaggtttgaattttctgatcaatggttaaatatacattgtcaccgtttttaggtgcggtgattttttctttgctgttcggaagtttccagccggatttatcactttcgtaagtgacggacccgtcacgttccgtcagatagttattcagtattttttcaagtcctaaagagccttgtatctcgtttgttttttcattcacatcggcatagccgagaacatttgacaaaaatatgccgttcggatagtagcgcttcgtatctcttaagaaagaaatacccggaagatccattttttcgatcttttgttttttcgcataagagatatcgcggccggctgaaccgaattccacctgcttcgcgccattcctgtttaagatgtccagaatctcgcttttatcaagattgataacggtcgccagtttttccgccgttttctctttgtctttgacatgctgaggatgcttcggatcactcgtcatttttttatcaagcacggcaatgagcttatatgtcgccgtgtcctctgcaagcactttgccgttccggtcaagaatagagccgcggctcgcttctatcgtccgctttttttcgtgctgctcggtcgcttttgttgcaagttctactccgtttgctttaccggttaattgaatgtacgccattctcccgagaatgacaaagaaaaagagagcgaaacaaatactgagtatcgctgctcctctgttcataaacttattttttttcggcatgggttatcattcctgtatgtttttcacttttttatctttcagattcaaaccgtgctttttagcgatatccatcaggcgctgcggctggcttaagtcagcagccgtcttttcgagatcaccgatctgcttattcttctcagatactttctcctccagtttttgcacctcaatattggattggtacgccgcgtatgcctttgatacgataaacattgatgtggagagaacggcaatggcaaacaggacgagcagcaccttttccccgagtgtaatggaagccctctttttgacaatcacctttttttcgggacttatcactggccgttgttgtttttcctgctggtaagctaagttgctcataggctgatgacctcctttaatgttgtcatttgctgcccgttattttcgtttctccgcaatgcggagcttcgctgaccgggcgcggttattttcttcaagctcctcttttgatgccgtaatgggctttctcgtaatcagttttaattccggttcaaattcttccggtatcacgggaagacccggaggcagttcgggaagtgatgatttttccttgaatgtcgtcttgcacattctgtcttccagcgagtgaaaagtgatcacagacacccttccgcccggcttcagcacctctatcgcttgcaagagggcctcttcaaatacctgaagctcgtcgtttacggcaattcgaatggcttggaatacacgtttggccggatgacctccgcttcttctcgccggagccggtatcgcgtcctttattagatcgaccagttggccggttgtttgaataggcgatttttctcttgcctcttcaattttccgggcgatctgcttgctgaatttttcttctccgtatttaaagaaaatcctcacaaggtcctcataccgccattcatttacgacttctttcgccgtaagggcggccgactggtccatcctcatgtccagcggtgcgtcatgatgataactgaatccccgttccggtgtatcaagctgcggagaggatactcctaaatcaaataaaattccgtcgacactcgtaatgccgtgttcatgtaaacactcttttaaataacgaaagttgctttttaccagaatgagctgtcctttgtattcggacaatgttttctgtgcgttttcaagcgccgtgtcatcttggtcaaaggcgatcaggcgtcctttttccgataattgctgcaataaatatgtactgtgcccggcgccgccaagggtgcagtccacataggttccgtccggtttgatatttaaaccgtcgacggtttcacgaagaagtactgtcttatgctgaaacatttgtgtcggtcccacctttatcaggaatgaattgaattgtcagttgttgttgtgatgcacgaagatccattatatatcaaatccaatcatgttttcagcaatttcagcgaatgaatcttcttgctcttctgtgtattgttcccatattaccttactccacaattcaattcgattggaaaccccgatgacaacacattctttttccagttttgcgtaattcagaagagatgacgcaatattaacccttccctgcttgtccagttcgcattcggtcgcaccggaaaaaaagaatcgggtaaatgcgcgggcgtcttttttggtgagcggcagagccttcagcttttcttcaatcagcttccattcattcatcggatagccgaaaaggcattggtcaagtcctcttgtcagcacaaactgctcaccgaggccttctctgaattttgcgggtacgatcatgcggccctttgcatcaattgtatgctggtattcacccataaacatgataaggacccccactttctcccctaaactcaccactatccgccacttctctccacaacctcattttacactgtttacacataaaaaaaaaccctgaactattcagggttctttaaaactttatttcaaagtttgacaatctgatgttggttttgaaaagaaaatggcagatgtttgaaggttgtgaagaattttggaccataacggttcaaataatacattacattccaaatccgttcctgcggagcgccgagcggtctgatgctgttttggattctttcatagtcacgcagcacaaaaccttctttttcttcaattcttttcgttaccgtccgttctaaaaacaagagctgatcctgaatgaaggcggcattcttctgtaagagcggctcaaggcttgaatcgaccttcagcgcttcgttccttgcgcttttatggacagcttcaatctgcgacttcgcctgttccattacagaagaaaactcttccggaatctgctcttcaaaataagcgtctttcaggtgtccggtgccgtgttcgatcgcttcctgaagcggaatattccgttctgaaagcttcttttcaatatggcgctcaagaatcgtaatgttcagtctcggcactaccggcgtcatgcggaagcccattaatgagaaagcctgcttcagctcaccccaataattgatctcccccggtcccgcgataaacgccagagtcgggatgagaaactcctgcataagcggccttgtcacaacgttattgctgaaacattccggtttttcttccatatgggtatgaagctcgtcgttcgtccacttcaggtcaagctccttaatgacaaaaacgccgttttctttttcaattaagaaacgctctccctcgtgttcgtaaaacagattagcctgatctttgtccgattcaataatcgggtgataaccggcttcccgcataagacgctgctggtctgacacggctttgacaagctcgtgattgtgttttaaaatctgctgaaacatacccgtttccagctttttaatccccggatctcccgaattcatcagaataaggccttcttcttgaaacaagtcggcgatcaacagctcaaaaaagtccgtgaatgtctctgatgagcgtaaacatcgcttcacgttttgaaggagtgtgtttgtgtgatccgtttcctcaaaagcagcgaacacttcatcaatccaagccgcgcatttttcctgatcaagctcggttttagccgccgatgtttttttccagtacgactgcggcagtttccgcttcaccggacctttattctctgttgacgtatgcacataattaatttcttccagatcgtgatcttcacccgccacccagaaaatcggagcgacaggaatctgcagcgcctcttcctgctgtctggcaagtacgataatggagataattttatgtatggtgtaaagaggccccgttaaaagaccggcctgctggccgcctacaaccgctgcgctttttggatctctcagtttttcgatggaggcctgcatggcggcggagtgaaatttttcgtgataggaggataaataatccgctaattcctctctggcaaacggccgcgaagagaggtcatgaagccgcttttgccatacgtcctctgaatgaatatcataatcaaaaaatgaagacatgttttctccatctatatagtgctgcacaaacttattttgacttttgatggaaagttcagttagctgcatctgtctggaacttcctttctccaataaatagttaggtttccgaaatgagtatagcatgttaccggaaaacctcaaaagactttgtttcaatttctttctaacgcttttatgctgcggtgtaaaaacgtgagatgaacggccggcaatccgcggctttccgcttcttttacaaggtagccgataatcgcatcggcctcggtccgcctgcctgccatgatatcgacgagcatggaagaatgatttttttccgtcagtctgcaaacttcgcaaaccttgttccacgctttttctctatcggcgaggccaagtattgtctccgcttcttcaaacacgtttctcatatattttttgtaagcgtcatttcttaacagctctccgtttttcacgcgcagcaatgcagttaacgggttgatgcatacattgatgatcagttttcccgttaaaagccgataccagtcgttttcatcatatacgggaaaatcccggtgcatgccggaaaagatgcttttgagcgtttccggccgggatgcgctgaatacactccatcttacggctcccgctcccgtatgttcaacggcatgatccgatatcttttttgctccgtgctcaactgtgccggcataaagcgaatgatccgtatgccaatctctaatgtcgtgtatgtgtcccatgccgttttgcaaaaacagcacattcgtcccttttaccgtctcaagatcccgcagcacagcactgagctggtgctgtttaacggctgcgattaagaggtcgaatccggaagtgatgcctgtttgcgctctgcatgccgccgtacattctattccgtctttcaaaagccgtataccgcctgagttaatcgcatcagcctgctccgtccgccgcgtaatgactgttacctgatggcgggacgataagtagtaagcacataaaaggcctaccgctccgccgccgataattccgattttcacactgtcacaccctatatctgcatttttccatattatcatagcagaagccgccgcaaattacttcaatttcgttttgagcaaaaagacaggcaagcatattatagttggaattttcaattaaagcgtttacaataatggtagaacacaacaaaggggagtttgtgttgaaaatagagcgcctgctcatcaactttaagacactcgaagaatttaaaaggtttaaggaatacgggatgcaggagctgtcgatgcttgaagatcttcaggataatatcattgaaaatgacagcacctcgcctttttacgggatttacttcggggataaactagtggcgagaatgagtttatatcaggtaaacggaggcgcgaatccgtattttgatcagcgtcaggactttttggaactttggaagcttgaggttcttccgggctatcaaaacaacggatacggaaaagcgcttgttgattttgcaaaatccttcagaatgccgatcaggacaaattcacgcatgaaatcagcagaattctgggataagatgaattttgagcccgttaaatatgatatggcgcgtgataaaggagaaaatccttacatctggcatcccgatatggacggtgaaatgacatccggagaaacggcataataaaaaaccggccgggccgccgccctcaggccggttcattttacaggctctgcgccgatttcctgtcgtcttcttttgaattgaccatccttctcgctctgtccataatgtcaattaacgctttataatcttcttccgtcatctccagcttgtttctcaagctttcattttcctcacgcagatcctcgacttctttttgcagcgcggtcagctgttctgtgagtttttctttttcatgacgcacatccgctgcggccggcgactctttaaattgctgaagaaacaaaatgacatcatcaatggacagctctttttctccttccgccctgcggatcggaggctgtttgacggttcccggcagattggcggaatgcaccccgatctgctttcttaattccttccgctgttttttcgccagttctatccctgactgatattgttttctgacataagaattccatctgaacccgcaggcggcagccgttctcgtcagcgctctgccgacttcttcaaaagcggaaagctgggtcccgccttcccgaatatgcctgagcaccacttcggccagcagcaaatcttcatcttgcgtccacgcgtcttgtctcgttatcgtcaatcgtatctccctccatatttgctcatttacctcatacatatgccgctgatagattagatagactactggcgctcacaattttttcggcggaagcaggccggaggggcaaaaaaaaagaaaagcgcaggaaccgagattcccgcgcttttcttcatacattaattgcttttaacatttatgtctttgccgttgtatgatccgcatgctttacatacacggtgagacaatttcatctctccgcatgacgggcattctgtcataccaggtacatttagtttgaaatgtgtacggcgcaatctttttttcattttagaagttcttctaaaaggtacagccattattcccacctccttaaagagttaagattcatcatcttgtgttaagagctttttcagatccgcaagtctggggtcgatttgatttttcttgtcttcctcagaaatcacttgccaatccttccccacttggggagcggctccttctttttgttcagtttcacaaaagacttgcataggaatttctaaaagaatctcttcttttacgatcggagttaagtcgacgatatcgtcttcagcaatatgaacgtcctcatcttctatatcatccgacttatgaaatctaaacagttcttttgtcgcgattgtaaatggatacggcacatcaactaaagttcttgagcacggcaaaaccatttcgcctgaaatcgtaaagtcaaacgaaacttgcttggattcaatctccgcgcggcccttcacccggacgggagaaatgcggcggatgtcagaattcaattttgtcagctcatttaactcaactgtttcatcaaattcaaagctctttttcgccatttgatgaagctgataaatcgtccatttcatttgtatcacctcaggaaagcaacaaacatgattatagcttttcagaatgtttttgtcaatattttttctttacagcataatgccgccgtcatgcaatcgttgacagccggataggctatgcatacactaaacgaaacggactaaaatatgcacttcatttgcaaatgtaccacacgaagcaaaacatagcaagaaaggcgggacaaatatgaaagcagtcggcctggttgttgaatataatccctttcataacggacaccgctatcatgcggaacaagcaaaaatcaaaacggacagcagcgtcgcggcggcggtgatgagcggcccttttttgcagcgcggagaaccggccgccgtctcaaagtgggcccggacaaaaatggcgctggaaaacggcgtggatatcgtcattgagctcccttatatgtatgccgtacaaaaagcggaattattcgcgcgcggcagcgtttcgcttcttcatcatttaggatgcagcagcttgtttttcggcagcgaaaacgggcggatcgaaccctttattgaagcgtctgaagcgttcagccgaaaggaagatgactgcagcctgattctgaaagaggagctgaaaaagggtctcagctatccggccgccgcctcaaaagctttttcacacatattcaaagggcgggacatgctcgatttgtccaagccgaacaatattctcggttttcactacgttagagcgatacacgccttcggttccgctatgaagccttatacgacagccagaatcgcttcccagtatcatgacgccgagcttcccggagataacagccggatagccagcgcaacaagcatccggaaagcgctgatagaaaaaggaacggcggccgcaaggagctttctcccggaagcgtctgcgcgtgagctggaggcatacagaaattcatacgggatatggcacagcaccgaagactatttttcatatgtaaaatacagcctcagcactctgtccgctgaagaattgagccgaatctatgaagtggaagaaggccttgagcacagaattctgcgcaccatcagacaagcccgatcctatcgcgaaatgatggaacgattgaaaacaaaacgatacacgtggacgaggctgcagcggatgaacacgcacattctgacacggacgaaaaaggaggacatgcatcggctcttacagccttcaagcgctccttatatccgtcttctcggaatgacgaaaaaaggacaggcgtacctgtcggcaaagaaaaaagagcttaccgcacctctcgtcagcaagctctcttctttctctcatcccgctctggatctggacatactggcgggacgggtttacagcctgccgataaaagaacctgaacgcacattttttgagaaacaggaattttcacaagcgccgatccgctatgatgaagacgaacagcgttttttgaatgcgtaaaaaaagcacctgcctgtatcaggtgctttttactttcagatgatccaaatagtcaagtgcgtcctgcatggtgtcgacagggacgatcttcatatcggacttgattgctttcgccgtttttaccgcatttttgtaatcagaattttcagctccgttttgattcggcgcaaagaaaatatcttttcccgctttgtctgcggcgacgactttctgatcgattccgccgatcggtccgaccttgccgtccacgtcgattgtccccgttccggctatattatagccttttgtttcgtcaggttttgtcagctggttgtaaatttctaaagacatcatgagacccgcagaaggcccgccgatattttcaatgctgaaatggagatccggctttactttcacgttccgatccgtatataacgcgacgccgattcccgctcttttcgggtcgtccgggaatgatttcagcgcaatgtcaacggtcttttctttcgtgtcccgttcaatgtgaaacgttactttctcccccgcttttttgctgctgatataatcaatcagcttttcagcggattcgtatgttttcccgtccgcgctgatgattttatcaccgacctctatttttccttttgccggcatgtcagagacgactgagctggcgaaaatcccgttaaatgagtatttcacctgtttcccggctttttgataagcggcaatgaccgcgttttcttgggagcttttcatcatttgcagctggcgcttcatataatccgagtccgattcgccctcttcttttatgctttcatcagggacgatttcatcgtaaggatgcactttcgcccaaagatatgtatacggattggcggggcctactttgacagtcatcaaggaaaggcttcctttttcaggatagcctccgtccaccttaatcagcggtctcagctctgatgcttctcccggctgtgtaatgtaatacggaagcttaataaatgtaacagcaattaataagatcaggatgataaacacccagcgaaaatgttttgctttcatatgagttagccctcccagttctctatttcttgtttaatccggccgatcatccggtctgcggcttcttcgcccgctgtgatcatatgatcaatgttggcaaaagaacttgagctgaatgattcaagagaagggcggatcatgacgtctgcggcaatggtctggtgacggaccaattcattttgcagtatatccatactttgcatgattacatcaaaaatatgtgccgctttttccgtttttttcacccgggatacgtcagaggcgatgacgatatcagcacccatgtcttttacggcggacaccggtattctgtcgaccaccgcgccgtcgactaacatacgtccgttcattttttgcgggacgaaaacgcccggtatgctgatgctcgcgcggacggcttcggatactgaacctttcgtaaaaacgagtttttcgccggtctgaaggtcgcaggccacgatgccgagcgggatccgcagttcttctatcggcttgccgtacgtataggcatgaacgagctgcctgatgcggtctccttttaaaaatccgagcctcggcatcgtataatccgcatacagccgccgcttaaatgctttggcgacttttttcatcgtagccacgtcatgcccggccgcataaaagctcccgactaatgctcccatgctgctgccggcaatcatatcaattggaatctgatgcttatgtaaactggataacactccgagatgagcgatgcctcttgcccctcccgaacctaacgctaacccgattgtaggtttggccaacgcgacgaaccccctaatagacatcctatacatgaattctatggtctaaattgaacccctatgctcgtatattagtacaggatgacaaataggtacttgcccggccgcctttaaggtctgttctatattttatcatgatataaatgtcagtgtgcaattttagcatcggggaggtaagaatgaatttgtctaagtttcatacatttttgatttcattgtttttcatttttttgacggcgacggttatttcacaccctcaggcctcattcgaagcctccaaaaccggtctttccatgtggtgggaggtcgtttttccttcattgcttccgttttttattctatctgagcttttaatcggattcggcattgtcaaatttgtcggccttttactcgaaccctttatgcgtcccattttcagagtgccgggggtcggcggatttgtactggctatgggcatggcttcaggcaatccggccggcgcgaagctgactgcacggctgcgccaggataaacaaatctccagagtagaggctgaacgcctcgtctcttttaccaattcatccaatccgttatttatattcgctgccgtggcggtcggcttttttcataacgcgtctctcggcattctgctggcatcggctcactatcttggaaacatcgccgtcggcctgacgatgcgttcatacggacggaaagaagaagcggcgtataccggtaaaaagacgatcgctctcccttctctgaaggaagcatttctggccctccacaaggcgcggctttcggaaaagcggccgctcggaaaaattttgggcgacgccgtcacctcttctgtacaaaccttgctgatggtgggcggttttattatattgttttcggttttcagccggttattatcaatcgtacaagtcatggatgtgctttctgtatttacaaacgcgctgctttccctttttcatcttccggcaaatctggacatccctcttatcagcggaatgtttgaaattacacttgggagcaagctggtcagtgaagctgatgccgccttgctgccgaaagccatgattgtgagttttattctcgggttcagcggcctttccgtacaggcccaggtagccggcattttatcggaaacagatatccgctttaaaccgtttttcgcggcgcgtatccttcagggcatttatgccgcactctttattctcttactgtggaagccgctttaccttgcattggacgaaccttaccagtccgtattcctccctttccgcgatcaggacgcgggatctgctgccgtcagcggatggaatacacttgttgaaaccgggcccgccatcacgctgacagctctcgccgtatacgcattgatttattgttacaggctgtcagcacggacaaaaaaaggatgagacgccgatcagcgcttctcatcctttaaatttctgcttcagcgcctgttcaacttccggaggaacaaactctgaaacaggcccgttatattttgcgacttcttttacgatgcttgaacttaaaaaagagtactgattgttcgtcatcataaaaaaagtttctattgattcgtcaagcacgcggttgacggaagtcccctgcatctcatattcgaagtcagaaacagctctgagccccctgataatcgccttcgcccgcttttttttcgcatagtcgattaacagtccctgtgacgtctcgaccgtaatattcggaatgtcttttgtcacttctcttaacagctcacagcgttcctcgactgtaaacagcggctgcttagaagaattattgagcacgcatacgtacacctgctcaaacacgtttgccccccgtctgataatgtccaggtgtccgtaggtgacgggatcaaaacttccgggacatacagctatacttgccacatcattaccccctatttcggtatatcgtcactcctgtaagcccgtaaatttcccttcttgttacagaaagcgcgccgacggcttcaggaagcacaacggctttatcatgctcggctacgacaaaaccgtcttcattcagcatgttctgctcatcaatcatttcgataagcgctttcagcttttgttccttatacggaggatctaagaaaattccgtcaaaacctttttcccgtttcgccgcggcatagagggcccgctctgcatcattgcggtatacttccgatgaagacagcagatcgagcgctttgatattcgcttttaccgtttggatggctttgaaatcacgatccacaaagatacagcggtcaaatccgcgcgacagcgcttcaatcccgaggccgccgctccccgcaaacaaatccagccctgttcctccgtcaaaatacgggccgatcatattaaaaatagactcttttactttatccgtcgtcggccttgttgatgtgcccggcaccgcctttaaggctcgtccttttcttgaaccggaaattactctcattattcacaccactttttctgaaaactttgatgtttctcatcggctgagccgttatgtataaaaacaatccctatcttatcataaagcattctttcaaacaatgaacgtgaaaaacgtgtatacatattcacattcctgtcaagactacgtgtaacagcatcaatgaatgatgttgttgccaaccgcggagaagacttacgtttccccataagttcttcctccggtttctcctctcccttttccttctccttaacttgttaaggaatagaaggaccccgcaggtatctgcggggatttttttatataccgactttataatcgtactctttcgctttatcaagctttgattcaaattccagctttaaaaaaggtttataagaaggctctaccttcttcacataagaataagaagaaatcttttccattgttttttcgatcaggtccatatcgcaatacagcacaacgtatttcagccgcttggaaacataatgaacgttgccgaattttctcagcattttgctgtgttttaaagaatgcagatatacgattatgccttggcgcttattttccatcatgatcacccgcctgactttctgttcattttatgtaaaagacgagacggccgtctcgtcaggaaactttgcatccgcagccgccgccggaaccgcagccgccgccgcaggatgacaggccgtcaaaataaggattccccgtcggcacttttacatgctccgagacggccgttccgagttcaatgctgatctcgtcaagcagcgactgaagctcagtctccgcttttttaaattcggccaccttatcgtttaaatcgagctcccgcttcatttctctcattttgcgggaaatctctctataatcaggatggtatttgccaaagcgctgcacatcctcatactgctctttaacgctcataaaagaacgaatgatccgccctgcctcttcatcttcacggagacgcttgtaacaatcgcggtaattttcagccgtctcagactgcagaatcatgccggcaagctgttccgcttcactttgaagcttgacggactcaattgttgcatacataaatacgcacctccagttgctagtttaccatgaaaccacccaattggaaaatgcggcgtttaaacgctttttaatcctgcgaacgcatggcgtgtaccatctgcatcatcatctgcgccatttgaatcccgtttgagaattgacttacccgatgcggtatcgtcttttcataaaaattcatcatgtcaagctgaaaggaattgagatcgtccggttttctcgcaagtctgcggtaccagacgggacgctgccgtataaaccgtttccgttcctcatctgcggatatgaattcctgaacctcttttcgcatacacgatccccttctttaatcctttctgaatgaaaaaggatgttgtccggagccttgccggggctgcttcgtgctgctccccgaaaattggcttaaaaggctttgcaatgatgaaatggactggctcattttattgatctgctcattcatttggttgatatccatctttttgacggcagtgaccatttttgaaacgaaatcgttcttttcagctggttcctgtttggtttccgcgtcggaagaaggctgaacggcctcgtctttaaaagggtcccacatcgaatcatcctcgcccaggagaacccagttttcatagacttcctgccagcttctttgttccttgcgaacattttggatcagtttgggatgcttttttacgaattgtttaaaatcatcgattgattgccgtgattgctgattcgccacaattctcaccccctccgaaaagttttgcctgctataatgtatcggttcatgcgccttaatgttcgcctaaattgcgaaaaaaagcaggtatatttttttcagcaggagcgccgctcgcgaaaaatcataaaaaaaccgcgggggacgcgcccctctgcggttttttactgccaaggcttaatgaagttttgcgtataatacttccggtccacgccgacaccgaggtgcgtataatccgggcttaacagcgccttcctgtggccttcgctgttcagccagccctccacggctgcaggaccgtccacatagttgtaggcaatattttcaccggcctcccggtatttcacatcgcctttttccaagcggtccttcagagtcccgtatttctttgagacgtgagagaaatacttgttatccttcatgtccttgctgtggccgaatgccactttcgcggcgccttcgtcccatttcagccttgccagtccgtgtttcacgcggatgacatttgtaatgtcgagaatctgctgttcactcgctcgttcaatgtcgttccattttttatcagaaactggctcgggttctgtcagctttcctctgtacatgacctcatacggcctttgtttcaccagcgtttccgcatcaaaagccctgatgcttgacagattcccgtcaaatttgtccatgtacagctgaacatacattccgcctatcttgacggtgggacgggtattgatatcttcttcggaaaactcaaaccgatacgtgtttcccttgtcagtcacattgacaaaaggagaaacctgcgtcgttttaaaaacttcgcccgtcgattcgccgatcttaaacggttttgcgttgatgccgcttcccgaagcgtataaagtcacggctttatcattcaaaataccgacttgtacgtattggtctttcccctggttgtacacccaccactcgtaatcgtaggcagaaggatctttccgggacggttccccaagtttctttttcacatcggcggcagatttccccatgagagaaagcagtccggatgacggcattttcagccgttttccgctctcttcttcattggaaacctgaggctcctcctgattggtctttttctgaggagccgatccatattgtataaacagaacatacgctccgtaaataagcaaaaggataacgagagcccttgcaatatttttcaacctctcacccccatatcatcaaaccgttctgtttttgtgtactcttatacagtacagcctatttgcatcgtccgtgatttatgtttaatggataaacccctccggacctccgtcttcagaaatgtcagacagcgcccggcctgcttgctcatttgattgctcggccaacgaaagatcgccgagcgtaacaatgccgaccagttttttatcccttgtgacgggaattcttctgagctgatgttcagccatcaaatggagcacctcctccacagaggcgtcttcttctgcactgataacccgctctgtcattgcgtcggttattttttgagagttcggcttttttgaagcaattccccgtaatacgagatctctgtctgtcacgatcccgacaagtgtggcgccgtcttcatccactatcggaatggcgccgacatccgcgtctttcatcttcaccgcagcttcatatacattatctaatactgtacaatattgcaagtctgacgtcatgagcttattgatctttgtcattgcggaattcctccttttttctgctactattgtcgtcaaatttttgtttttgcatactttcaccgtatgaatcattgaaagtgtaacgctttcatactatgattgtcaggaaagggcatttttaaaaggagggggaaggtttgaagtttgaaaacagcggtcttgaaggggtaacagcggagctcagccgcttgaacgatctgatggaaggcaaagggctcattctggctggacaatgggattatgaaagagtgacttacgacaaaaagttttcagtacctgaggggacattttatctgcggattcaaggaacggcaaaagagggcgatgtcggcggcagacgggccgtgattcagctgaaggcccctcttttaggaaagcattattatccgcacggcgtagaatacggcagcgctgaagaatttccggaacatgtcatcgctgaaagcaaagctttactgcttgaattggaagagtcattaaaaacagtgcaaatgtaataaaaaagtacagcatattctgctgtacttttttttatgagacggtatgctcgatatacggcggctctgacagcgtatctttttcccgttccgttctgacccactgaaaaaagatgacagccaaatatattccgtagaccgcctcttgaatgattttcatcagcactgccccaagctgctgatcttccagaggaggtagcgtgttaaacatctccggcccggataaagggatctcctccagcaaatctaaaggaacgcaaagcttcattgcttcggcccaagccgccggatctgtatacgtggcatacatgggcgccccgctgaacataatgagcgcgcaggccggcgttaacaaaatcccgtccgccataatataccccagcttcattaaaccgctgagacggggcagaccgtccaccttatgcacaagcggccaccacataaaaaacgccgttacaaagatgagtccgttcatcagcgtgtgatacagcgaatccgttttgacgaaatcaaatataaacgggatgtgatacagcgaaaaaataccgttaaacagcactaaagcgataagcggcattgaaaaaaatgaaaacagcggctttacgacaggacggaagatcagttttttccatgcccagccgggaattccggagatcaacagcggcggtacgactaaaaacagaaccgccatctgcgccatatgggcgctgaacatcacatggcccaataaatcgaccggacttcccgcagccgcgtaaaaaaatagcgcggaaagcacaaacagcaccttctccttaacggccacacgtcctttatgccggctgcaccagtaaaagtaaacacctgttatcacggcagttatacaaaacagatacgggctccacattgcgcgaaacccgaacatttccaaattaatcaaatctctcactccccgccgccccgattaccaccaaataatcgtgacaaatgcaagcacggtgataaacgcgacaaatattcccgaatacagaaataatgacggcgcttcatgccccttctggctcatatgcataaagtaaaacagctgaaagatgacctgaatgaccgcaagcaggatcagaaacggcatcgtaaaccatccggcaatgccgtctgcagccaccgtcaaaaacgcgacaagcgtaaggccgatcatcaagccgaaggagatgacctgatatttcatctcctcggcatttttccttctccgatattcaagatccgtactgacagtctctctgtttttgttatcgtccatcgttatcccaccatccccatcaaatatacaacggtaaagataaagacccacacgacatcgataaaatgccaatataagctggccacataatatttcggcgcattataaaggctgagccctcttttcgcattccggatcatgagcgcgctgatccacaacagcccgaacgccacgtgtgctccgtgtgtgccgacgagcgtgtaaaacgctgagccgagcgcagagcttgtaatggtaaatccgaactcgtgagtgtaatgcataaattcatagatttcaacccctaaaaatcccgctcccaataatacggtaaccagaagccacacctgcatttttttaaaggagaaatttttcatatgatacatcgcatacacactcgttaagctgctcgtcaaaagaagcatcgtcgcgataaacacgatcggcagctcaaacatctcagccgttgacggccctccggctttagattcccgtaaagcaaggaatgtcgcaaatagcgaggcgaacagaaccgtttcgccgccgagaaacagccaaaatcccaaaaacttatttttcccctccagcgttgctttttcaggagaagccggaaaggtttcagccgtcattttttcctgcagctgcattacgccttcacccctttatcatcattcggcagatcttctttgtgaatatgatagccgtaatcatcgaccacagagcgaagcagcatggtaaagaatgtgatgccgagccctatgaagataaccggaagcccccatgaataatcggagtggtataaaaacccgaacgctgccacaaacagcccgaaagatatgataaacggcatgatggagccgttcggcatatgaatgtcctctacaggctctgcaggcgccatcccttcatttccggcctgcttttcaatccacagcgggtcaagtccccggacaaacggaagctgtttaaaattatattccggcggcggcgaagagaccgcccattcaagcgtacgaccgtccagccacgggtcgttcccgacgtatttcccctttattgaggtataaataatattgacgacgagtaaagcggccgcgcctgccatgaaaaacgcgccgattgaactgatcaggttgccggtatcaagcccctggccgggcagatatgtgtaaacgcggcgcggcattcccatcaagccgagaaaatgctgaatgaagaaggtaagatgaaacccgataaaaaataagacgaacgaaattttccccatcgtttcatgaagcaccttcccgaacattttcggccaccagaaatgcacgcccgccaggatgccgaacacaacgccgccgataatgacgtagtggaaatgcgctacgacaaaatacgtatcgtggaactgataatctgccgctgcggccgccagcatgacacccgtgactcctccgagtacgaaagaaggaataaaggcgacggcatacagcataggcgtcgtgaatttgacgtttcctccccagatggtcaaaagccagttgaaaattttaatgccggtaggcaccgcgatcgccatcgtcgcaaccgcaaatatcgcattagcgatcggtccgagtcccgttgtaaacatgtggtgaacccataccatgaacccgagaaagccgatcagcacgatcgcaaagaccatagacgaataaccgaacagacgtttcctcgcaaatacgggaatgatttctgaaaaaatcccaaaggcgggaagaattaaaatgtatacttccggatgcccgaaaatccaaaacagatgctcccagattatcgtattgccgcccaattcaggattaaagaaattcgttccgaacaaacgatccagcatcatcagcgccaaaccgacggtgagcggaggaaatgcgaataaaatgagtgccgacgccacaaatgtcgtccacgtaaacagcggcagtctcatatacgttaaacccggcgccctcatattaataatcgtggcgagaaaattgatccccgcaatgagcgtacctaagcctgatatttgcaggccgagcacgaaaaagtctatgccgtgccctttcgaattcagcgcaagcgacgcgtacgacgtccagcctgcatcaggagcgccccctaaaaaccagctcagattcaaaaagatgcctccgaagaaaaacagccaaaatccgagcgcattcaaaaatgggaatgatacgtcacgcgccccgatctgcagcggcacaaccgcgttcatcagcccgaataacagcggcattgccgccaggaagatcattgtcgtgccgtgcatcgtcataatttcattaaactgctgagcacccataaaatcgttccccggcctcaagagctgaatcctgataagcatggcctcaagtccgccgacgacgaagaaaaatcccccggcgatcatatataaaatcgcgattttcttatggtcaaccgtcgtcaaataatcccaaagcaaagagctttttctttgctgtcctgtaagcgtattcatcatttgcgacctcccccctgatatctccctgtcctcacttgttctccgctttcagcccttttaaatattcatacagcgcatccgtttcagcgtccgagagcttcggataagtgcctgtcattttattgcccggtttaatgctgtccggatttttcagccaggcttttatattctctttattcgcatccttaatgccggccactttgacccgttcaccgaaggtagcgaggttcggagccgttcttgccgcttcagcccgtttatcattgggctcaaccgcatgacagctcaggcagtttttttccttaaacagctcttctccttgtgctgctaaatcggaatctgttgtatgcttataatttttcatcgctttcgtccattgtttaaattcttttgacggcagcggtttcactttgaaatccatcagcgcatgtgaaggtccgcacagctctgcgcatttcccgaagaaatattctcccgcttctttgctgcgtttagaatcgaaggtcagaaagaaagtgttgtcattatccgtattcgtatcgatttttcccccggctgacggaatccagaaagagtgtttcacatctgaggacttcagcttgaaatagacgcgttcatctgtgggaacgatcagctcctgacttgtcacaaacccgtaatcgggatactcgaattcccaccagtataaattcgcccttacattaatcacgagcgcatcctctgctttacggtttttcttatccatcggcgacgtatccgccagtgccaatgtatcgatgacaaccggaatgacaagaataatcagaagcaggatcggaataacggtccaggtgatttctaaaaaacggttcccctccacctgtttcggtatcgtgtcttcccctatacgcgaccgtctgaatctcacaatgacgtaaaagaaaataactgctacgaccgcaacgacgacaaccatgataagtgtgctgagcaccgtcagatcatattgtttatcagccacttcgccggcaggcttgagtgtggacagaaacggttttccacagccgctcaataaaagcggcactaaggctaataatgataaaagacgccaacgctttaacatttcacccaaccccttttttgaatcagtacgagatgcacaagcagtaaatctgcttccagccgaaatacttcatttcctcatttcttaaaatatgagattttttacttaaaattccatctatgtataaaagcaaagccgcctgattaaacaaaaggtcaaggcggcgtttactagttgtcattgtttgttttggcgatcaaacaagctcattattcaattaaaacagcgtgaagaccaccatcgctacaaaataaatggtcatgtagttaagcgaatagacaaacataagggttgcccacttcatgatgtttttcatgcggaatcccatcagtccgagaacaagccatccgacattcagcaaagtgccgagaatgacgatcggaagaccgagactgccgaggaaaaacggaagcggcagcaggcatgcgacccagacgataatctgtcttttcgtcacttcaaagccgtgcactaccggaagcatcggaatattcgctgctctgtaatcttccgtctttttaatcgcaagcgctaaaaagtgcggaatctgccagatgaataaaatcatgaataaaacccacgcgacaacaccgatgtgcccttcaaccgctgtccagccgattaacggcggcacggcgcctgatacacttccgacaaccgtattaatcgtataacggcgtttcgtccacattgtataaagaacaacgtacgtaaacacgccgataaaaccgatgactgctgccatcacggtggtcatcaaaagcatgataagtcctaaagcaatgagtaaaattcctgaccacagcgcttgattcggctgaatctttccggttaccgtcggtcttactttcgtgcgttccattaaatgatcaatatcacggtcgtaatagttgttaaccgcacaagaaccggcgatgatcaaagaagatcctattaatgtaagaagcacggtgtttaaattgcctaaaaaactcagaccggatatatgtaacgcaagccacatgccggtaaaagtcgtaattaaattcgaattgacgattcctattttgataagcgaaaggaaatccttccatgccgtcgtctcttcaatctgtccgtctatagctgtatcgtttaaaattctggaattagccataacgtaaacctcccttacaaacctaaagcaggttttttaagacctgcaactctatcatacaagataatgacctgtaaaaaaacatcctcttaaatattaaacgagaaacaggaatttatttgtgaactttttatgaattttaccaaatccgccggcttcataataaagcggttactttatttctatcagacccatctggaataatcaaccccattatctaagaagtcctgattctattatatttttgtgaacaaacagaattgagaattgccacaaaacacatattcgcttacacttggtacgtatatcattttgtccagtttgttaagaaggtgaatgtaaaatgaataaagctttgaaagcgctcggcgtgctgacgacgttcgttatgctcgtcgtgctgatcggcggcgctcttgtcacaaaaacaggatcgggtctcggatgcggaaggcagtggccgctttgccacggccggtttttcccggagcttaacgccgcttctatcattgaatggagccacagactcgcaagcggtgtctcaatcgttctcgtgctgagtctcgctttttgggcatggagaaaagtcacgcctgttttccgtgaaacaacctttctcgccattatgtccattatctttttatttttacaggcgcttctcggcgcattagcggttgttttcggatcaaatgcgctcgttatggcgcttcatttcggcatatcgctgatttctttcgcttctgttctgattttgacgctgctcatatttgaagctgataaatcagacaaaaagctcgtcaagccgctcagaatcggcaggaaaatgcagtttcatatgatcggcctttcgatttacacgtatatcgtcgtttatacgggggcttatgtgcgccatacaaaatcaagccttgcctgtcctgacgttccgctttgcagcagactgaaccacggacttccgtctcattttcaggagtgggtgcagatgggccacagaacggcagcgctgcttctgttcgtatggattcttgtcgcttttgcgcatgcggtgcgctcctacaaagaccaaaaacagattcttgggggctggatagcggctcttgcctttgttgtattacaggcgctctccggaatcatggttgtttattcagaaatggccaccggctttgcacttgcccattcgctctttattgccggtctgttcggtgtcttatgctatttcttattattaatcgcccgcttccgctatgaatcaaaacagcggaacatctgaggcacatgaaaaggccgaagcatcaaagcttcggccttttcacatataaaaaacctgatcgcacacggggcggatcaggttttttatgtttattttttacgctttttcaatttcgatcagtaaatcgcctgtctgaatcggttcaccgtttttcacatgaatctgctgtattgtcccggagaacggcgcctgtaccgtcgtctccattttcatcgcttcattaatcatcagatgatcgcctttattcacctttgccccggtttccgttaacaatttaataaccgttcccggcatggatgccgcaatgtggcttgggtttgtccgatctgcttttaatttttcctgtacggacgatttaatgctttcatctttaatgaccacttcgcgcggctggccgttcaattcgaaataaacgacacgtgtcgcatctggctgcggttcaccgatagatacaagcttcacgatcagcgtttttccgcgctcgatttccacttcgatttcttcaccgagtgtcatgccgtagaagaaagtcggtgtgtccaatacggaaatatcaccgaagcgttcagccgttttaacatattcagtaaatactttcggataaagagcatacgcgattgcgtcctgatcactcaattccatctgatgcgtttctttccattcttctttaatgccttcaaaagataccggttcaagcagctcacccggtcttaccgtgatcggcgtctgtcctttcagaacgagcttttgcagtttttccggaaatccgccgtgcggctgaccgatctgccctttaaagagctcaacgactgaatccggaaaatcaagcgtttcgcctttatcataaacatcttgttctgttaaattgttttgcaccatgtaaagcgccatatctccgacgactttggaagaaggtgttactttcacgacgtcgccgaacatgcggttgacaacgctgtacatgtctttcacctcattccagcgatcgcccaggccgactccttttgcctgctgctgcagattgctgtactgcccgcccggcatttcatgattataaatctcagtatgcggagacttcatcccgctttcaaattcactgtaatactgacggacggattcccaatattgtgacagtctttccacctgccggacatccatttcaggacggcggctgtttccttcaagcgcatgataaaatccgcttgcgctcggctgtgaagtcagacccgccattgagctgacggcgacatccacgatgtccacacccgcttcaacagctttggcatagagaaagacgccattgccgctcgtatcatgcgtatgaagatgaacgggaatatcaatcgtttccttcagcgctgagacaagttcgtatgcggcttgaggtttcaaaagaccggccatgtctttaatgccgagaatgtgcgcaccagacgcctcaagctctttcgccatagaaagataatattgcaaatcatatttcgtccgggtcttatcaagaatatctcccgtgtaacaaatcgcagcctccgccacttttccggtttcacggacggcatcgatggccagcgtcatcccttttacccagttcaggctgtcaaagatccggaatacgtcgataccggactccgctgactgccggacaaatttttgaatgacattgtcgggatagtttgtataaccgacggcatttgatgaacgaaggagcatctggaacaatgtgttcggcacttccttacggagatcttcaaggcgtttccaagggtcttcttttaagaaacggtacgctacatcaaatgtcgcgcctccccacatttcaaggctgaacagttcaggccacagggcagccgtaggattcgcgatttttttcaaatcgttggacctgatccgtgttgcgagcagggactgatgggcatccctgaacgttgtatcggtcaggagcacggatttttgctctttcacccagtctgcaagtccctcggcgcctctttcatcaagaatctgtttcgtaccgcttgccggcttttccccgatatctaacgtaacggtctgaggcttatcaaatgcaggtttttcttttttcccgattcccggaaaaccgttcaccgtgacattgccgatataggaaagcatttttgttccgcggtccttctgttttgggaaaacaaacagctcaggcgttgtgtcgataaacgatgtgtcgtattggcccgtcaggaatttttcatgctttgccacgttttcaagaaacggaatattggtcttaatgcccctgatcctgaattcctgcaggttgcggaccattttcgctgatgcctgttcaaacgtcagcgcccatgtcgacagcttgacgagcagtgaatcataataaggtgtgatgacggcgccctggaagctgtttcccgtatcaaggcggacgccgaaaccgccgcctgagcggtaagccataattttacccgtgtcaggcataaagtcattcagcggatcttcagtggtcacacgtgattgtatcgcatacccgtttgtaaaaatgtctttctgctctgggatattgacggcgcggctgtgcagtccgtggccctgcgcgacgagaatctgcgtctgaacgatatcaacccccgttatcatttccgtaatcgtatgctccacttgtacgcgcgggttcacttcaataaagtaaaattcaccgcccgctacgagaaattccacggtccccgcgttgatatagccgacatttttcgcaagcgccacagccgcttcacagatttcgtcccttaattcaggctgcaaagatacactcggcgccacttcaatgaccttttgatggcgtctctgaacggaacagtcccgctcatacagatggacgacattgccttctttatctccgatcacctgaacttcaatatgcttaggattttcgatcagtttttcaacatacacttcatcatttccgaatgcggctttcgcttctgatttggcccgctcaaacgattctttcaattcgctttcgcttcggacgattctcatgccgcggcctccgcctccgagcgatgctttaataataaacggaaatccgtggacttttgcgaattgttcgacatcttttaatgtttcagccggtccgtcactccccggaataacggggataccggctttttccgcctgctccctcgcctttaccttatctccgaacatatccaaatgcgctgacgtcggtccgatgaatacgatgtcctcttcttcacagcgtctcgcaaattggatattttcagagagaaatccgtagcccggatgaatggcatcaacgccgtttctttttgcgatctcaataatcccttcaatatcaagatacgcgtcaatcggttttttgccttcgcccacaagataagcttcatccgctttatagcgatgataggagcccgaatcttcttttgaataaacggctaccgttctgatgttcaattctgtgcacgcccggaaaatccggatcgcaatttctcccctgtttgctactaacactttttggatggattgttgtgacaaacttttctcccccttggcctaataaatatgtagtttataataaaggaatatccgccctgtgtatacacttgttttttagagatacacagatttttccgtctgccgtctttttacccctttagacggaacgggctccctctttttcttcttttctgagtacttgacatgcatgctgacattcaccaatataccggcgctcgtcaataacaaaaacattgatgatcccccgtagctgataaacggcagcggaacacctgtgatcggaattaaaccgctgacaccgccgagattgataaaggtctgaatcgcaatcatgctggatatcccgattgccaaaaggcttccgaacggatcttcacattttctcgcaatataaaaaccttttaacaccacaaaagccagcagcacaatgacaaacaggacgccgaaaatgccgagctcctctgaaataaccgccataataaagtctgtatgcgattcaggcagataaccgtatttttgaatgctttctccaagaccgagaccgaaaaaaccgcctgagccgatcgcataatacgaatttataatctgcagacctgatgtgctggcgtatttaaatggattttcaaggctttcaaaccggctcatacgcccgggtgtcaaaatatcgtcccatttcagataaatgatcgggctgacaaggagtaatacgattcccgccatgagaaccagcctgagcagggtccttccgctgaatcccgaacacataatgacgcaaaacgcgatcagaccgataatcatcgccgttccgaagtcgggctgaatagcgataagcgcacaaatgactacggtgacgatcaccggcggcgcaacccccgtcaaaagctgatcgatgtagctttgtttctttgcgtacaccgcggcaagatacagtatcagggtcagcttgacaaattcccccggctgaatggccattccgccgattttaaaccagctttgcgcatttccggcaacatgtccgaaaacaaacagcgcgcaaagcgcagccactgacgcaagcagtatgattttctgaatcttttgatgggcgaacactttgtacggaaaaacggccgcgataataaacagcacaaaccccgcgatgacggcgaacagctgccgtttaaagaaatagtcgctgctcacgccgtaacgcataacggcggtaatcatgcttgagctgtataccattaccaatccgaaactgcacagcagaatgatagcgcatatcaatgaataatcgtaagattttaacattcttttaaacataacatcctctttcctgcttaaagcttacgtttaatacctattgcgtattatattttactataattcataaacaatttacgcagtttctttatagtttttcggatgaaatgcagattaagagaccgtcttacgaaaagaagatgcaaaaaaacggtttacggttataaaaaaacccaaaccgttgaatagtttgagtttgatcatttattttcctgtaaacgcgtcatgcaaagcagacagttctctttcaagtctgtccagcagctctttgccgtcgttttcgtcaactaatcccaggcggacagcaaaatcgatttccctcgacagtccgaacatctgagtatccaagacctcttcatacagaggacattgaggcatcgttaagttatccatttgtactcggatcagcttcaaaatcttctcagcatctaacttcaacagctcgaatgctttctgctgatggtcaactataatctctgaagccaaaagtatccctccgttccccaggcgagtacctaattcttctatttatcataaagggtatcagatgaaattgcaagaggatttaagcagatgttatgataaaaaatgtttcaaaaaatactcagcctgtatttctcagacatgatttccaaaagcttcacacccgcgatgctgttgcctttttcatcaagcgccgggccgaatataccgattccgaagttgtacggcgaaatgcccatgattcctcccgaaacgccgcttttagcgggaatgccgaccttgattgcgaattccccgctcgcattgtacatgccgcatgtcaccataaacgtcttgcagattctcgccacatcttttttaatgacctgctccccggtttccggatgcttgccgtcaagggcgaatacacagccgattttggctaaatccagactgctcatcttaatcgcgcactgttttgtatacaaatccatgacctcttcaacatcgcctttaaaaatgtcatactgcttcatgtaataacacatggcccgattaatcatggaagatttgaattccgattccgcgacatgtctgcaatatgtaatgtcctgattgttcgcaagtcttctgatgaatccgagcaggtaatccaggcggtctttcggcgaatgccctttaattaaacccgtaacgatgagagctcccgcattaatcatcggatttaaaggcttgcccggattcactgtttcaagcttaatcatggagttaaacgggtcgccggtcggctcctgacccacgcagctgaacaccttttcctttccgtaatccatcagtacgagcgccagagaaagcactttcgaaatgctctgcagcgtaaatgtccggtcggcgtctcctgccgtcagacatgtattttccgcatgataaatcgtgaccgaaaggctgtcttgttcagattcagccagagccggaatatagtctgccactttgccttctccggttctttttttcgcttcctgaactaatgcgtccagctcttggtaatgccggcataccatgtcgatcatcctcacttcgctgccgttgtatacatctaatttgcaacgcaaagtgacaattcatgcgaaaacttttatactttaagtaaaggggggcttcaacatgagcgttattcaagtaaaaggcaatgttacatacccgattacaattgatccgagtgtctggattttcgatgaccgcaaatttccgtttgaaaacaatcagcctgttcatcaggacggctctgcagaaacccaggagcatacgcttgatcctgaacgggtgatcagagaagggcgcatttcgccgccgactttaaaaagtgaaaaacgttatgaaaaagaaagactgatgaacggcagcttcgccatgaagctcggcgctgttttagcaaatgccgagccgaaagaaagcgctgtcctgtgcgcatttatttcaaaatcagaaagaaccgaagtgccgcttgaaaaggcgatggacgcaatcgcgcatttcagcgatgcggggaaaccgcttcaagacggcggtccggtccatttttacgtggacggagactttgaaaaaccgataacgggcgtcacagaaatcgaagttttataacaaatcggcggcaagctgtgcaaggccggatctctcacctttcacaagcttcacgctgccggagacggtttgtcctttaaaccgctctacaacataagcaagtccgttgtttaaactgtctaagtatgggtgatctatttgctccggatcgcccatcaggacaattttgctgccctctcccacccttgtcaaaagcgttttgacctcgtgcctcgtcagattctgagcctcatctataataataaactgatccggaatgcttcttccccgaatgtatgtcagcgcctccacctgaatcgatccgattcctgccaaaatcgcttcaagttcacccggctttttcgcattgaataaaaattcaagattatcaaagatcggctgcatccacggcttgagcttttcctctttttcgcccggcaaatatccgatatcctttcccaccgggacgatgggacgcgcgacgatcagctttttataaataccgagatcctccgtctgcagaagccctgccgcgagagcaagcaaggtttttcccgttcccgcttttccgatcagggtgacaagcgggatatcttccctcagcaggagttcgagcgccattgtctgctggacgttcttcggcctgatcccccatacgtgctcatcatcgaaaacgagtctttttacggtctctcctttcttatccgccatgccgaccgcagacgaagatcctcctaattcatctttcatcagcacaaattgattcggataaacctgatgctgctgaagctccttgactggaatttgtttgtttttataaaacgaggcaaaccgctctttattcataaatatatctttgtacccgctatatatttcatgatggtcaacgactctgtcgtttaaaaagtcctccgccaaaagcccgatggcatccgcctttaccctgacaagcacatctttgctgaccaggatgacgaggcggccgttttctttcgtttcctcctcaaggcttaaattttttgccaccgccaaaatgcggttatcattcgttttttcgataaaaatttcttggagctgatgaaatgaccggtggttcagttcaattctgagcgttcctccgctttgaagcggaactttctcgtgcagccttcctttctccctgagcccgtctatcagcttagatacgtgcctcgcatttctcccgacctcgtccatataccgcttttttgaatcgacctcttccagcacgacggcggggatgacaacttcgttttcttcaaaggaaaaaatggcgttaggatcctgcaaaagtacattcgtatctaacacataaattttactcaagtctcagcctcctgaaataaggatcaaagcccatcgtgtgcttctctttccgcgaaaaacggggatgcctgctaaaatatatgatttggtgaataaagatagaaggttaattcaacaataaaataaatgaaagcattcaaggagggaatctgacgtgcgaattcttttcattatcatacaagccttgtttatcctgaccggctgcactgctgtacaggacggccgcggccgcaatatccagaacgaatcaaccgatcagcgtgatgcaaaaccgattcatgtaaaaaatacggctcctgagacagctgaaaatcccggccggacagacatcgctaagcatctcgtcgaggtaaccgaaaaaatccccggcatttcagatgccaccgcggttgtactcggaagatactccgttgtcggaatcgatgtggatgacaatttagaaagaagcaaagtggagagcattaaatacacggtcgcccaggcgttaaaaaacgatccttacggcgccaatgccgttgtcgtggctgatcctgatacggtttcccgtctgagaggcatgggcagcgacattaaagccggccgccccgtttcaggcattttggacgaacttgccgccatcgtcggtcgtgtcatgccggaagtcccgaatgatgtgaccgacaatgaaaaagaatcaccgactcaatcgaatgatgatcagctgaaccaaagagaccagaacaagctgcagaacgaacagaacgatcaatcggatcatcatatgaaaaaccgccagtaaaaagcagcgcccgctccaaaagaagggcgctgctttctttccctttggcaggaggggcatccatgatataatgcttgtcatagtgaaagaggtgaaaatcaatgagagtaaaatgttccatttgcgacaaaattgaacaaattgatgatgaaacactgacagccaaacgcctccgcaatcgtccgattcatacatatatgtgccgggaatgccatgaccgaatcaaaatcaaaacggaggcgcggctgaataccggacacttttcctttcatcctggacaaaaagcgaaaaaagataaactgaaaaaataaaccgcaataaaaaatgacccgccggaaggcaaggtcatttttttattgcggtttagctgactggctttttttggactggtgcagacggattttgtaaatgatcaaaatcaaggcggcgacaacaagcccttctccgaccggcaaaaacacaccgaaaaaagtcagcacggtgcagccgagcacgagaaagagataaactgccgcagccttcaaaaccggcagccgtttggcaaagccgagtttaaatacaatcaccgaaagcacgacgatcgttccgtataacagccacattcccgccagcggatgctcatccacttggtaaagagccgcaaagaacgacagccgttcacttacttcattcaaaaagatccccctccccttttccgttcgggttctaccttttcaaattctgcaagtgattaagacattcctgctgtttttttctttttcgccgctttttcacgttcgtttttattcaggattttctttcttaaacggatggattccggcgttacttcgcagtattcatcctcgtttaagtactcgagtgattcttcaagcgacataatgcgcgctttcttaatcgtagtcgtttgatccttcgtagcggaacgtacgtttgtctgctgtttcattttgctgacattgacaacaaggtcattgtcacggttatgttcgccgacaatcatgccttcatacacttctgttccgggctcaacgaagatgacgccgcggtcttcaataccttgaattccgtaagatgtcgcttttccgttttccatggaaacgagcacaccctgacgtcggcctccgacttggcctttttgcatcggctgatagctgtcaaacgtgtggttcaggataccgaaaccgcgtgtcagtgacagaaactcagtagaatagccgatgagtccgcgtgaaggtacggtaaagatcaggcggacctggccgtttccgttattaatcatatcaagcatttcgccttttctcgcacccattgattccataacagaaccggtatgctcttcaggcacgtcaatctgcacgcgctcaacaggctcgcagctgacgccgtcaatttccttaatgataacttcaggtttagacacttgaagctcatagccttcacggcgcatgttttcaattaaaatggacaggtgaagctcaccgcgtcctgaaacaacccatgcgtctggtgatgcagtcggttcgacacgaagactgacgtcagtttgaagctgcgcattcagacgctcttcaattttgcgggctgtgacatatttgccttcacggcctgcaaacgggctgttgtttacgacaaatgtcatttgaagcgtaggctcatcaatgcgcagaaccggcagcggctcatggtggtcagccggacaaaccgtttcaccgacgttgatgtcttccatgcccgaaacggcaacaaggtctcccgctctcgcttcttcaatttccacgcgtttcaatccttggaaaccgaagattttcgttacacggaatgatttaaccgttccgtcaagtttcatcaatgaaacctgctgacccactttcatcgttccgcggaaaacgcgtccgataccgatacggccgacataatcattgtaatcaagcagcgccacttggaattgaagaggctcttcggcgttatctaccggggcagggacatgttcaagaatcgtttcatacagtgattccatgttttcgtcctgctttttcggatccagacttgccgttccgttaatcgcagaagcgtagacgacagggaactcaagctgttcttcgtttgcgtcaagctcgatgaacaaatcaagcacttcatcaatgacttcttccgggcgggcgaaatcacggtcgattttgtttacgacgacaaccggatttaagttctgctcaagggcttttttcagtacgaaacgggtttgcggcatgcagccttcataagcgtcaacgactaacagaacgccgtcaaccattttcataatccgttctacctctccgccgaagtcggcgtgtcccggagtgtccaaaatattaatgcgtgtatctttatagttaatcgcagtatttttcgcaagaattgtaataccgcgttcacgttcaagatcgtttgaatccattgcgcgttcggcaatattttcgttggcacggaatgttccggcttggtgaagcaattggtctaccaaagtcgttttcccatggtcaacgtgggcaataatcgcgatgttgcgaagatcgtttcgaagtttcacattttcatctcctaaaaaaattagataactttcatattataccacacatcctctttaaaagcgttacgtttttctgtaaactgaaagtatgacgttaaaggggatggaaatatgaaaaaattgaattggctcttattattatttgcattcgcagcagtcttcagcatgatgctgatcggcgtatcaatcgctgagaaaagcgcatggggcatcatcggaagcattgttctcgttatcgccatgatgggaagcggtttcaccgtaaagaaaaaaatgcgcgaacagggactgcttgattaaaagcatgaccctttgcaaaattccgtaaacatggaaagacaatatcttatgaagcctgaatcaaagattcaggcttttttacctcctcaaaaacagactccagatgtaaggcttatctcccccgccgtctagtcaggaagccgggaatgacggcccccattctagttacatcagcagattccctcagaatatacagtctgaaatagtccggcatcgttatgcagaaaataccatacctcctatatcaattccatcattgtctttttatacttgtgactgtaagcaaatacacatgacaaggagagaatgaaatgaaaacatcttttttgaagaaaaccgctgtaactgccgccgcaaccgcctcagccgccttgcttgcattcagtccgcttgattctgccggcgcaaaaacgatccaggcaaatgaaccgcataccctgcaggtttccgcagagaaaacaccggaagacgcggcaaaactcattgacatcatcagccaatcgatttacgaaaaagacggcgtctattattttgacggtgaaaaagcggttgaattgggattagataaagaagccgcacagaccattcaaaagctgtgggacagttcaaccgaatttttaaccgttctttctcaatgtattgagaaaacggacggcgaatatacatttaataaagaaaaagcggtggagctcggatttacggaaaaagaggcccttatcgttgatcagctgttcaccactttttcccaaagtcttcatatccttcaatctgcgctgattgaagaagacggtgtgtatacgtttgatcaggaccttgctgaaaaagcaggagcaggaaaaaaagaagcaaagctgtgtgccggattctttaattcactgcctcaggacttgcttgaaggcatttatacagcctttcatccggctgagtaaacggataaaacgcccggtcatgtcatgcagccgggcgttttttttaatcagcagtttaaagatcagcatgataaagaaaacagcgccgaacaaacaggctgcttttatcagcagcttcccgtaataccgttccttaaaccgcctttcttcttctgcataacaggcgggctccttcatctcggggctgccgaggtcaagcggctccttcatcatatgatataaactttcgcacttaccgcatgattcaaggtggcgggaaataaaccgctccgtttctgtttcacaatcgccttcaatatatatagggagtaaatctctcactaaacagcaagtcatatctgtccgtccttccttttttccgctaagtgctgtttcagctgcattctcgccctgtacagagtgctcttcaccttcgaaagactccagtccaaaacatcagcaatctcttcgtaagacagctcttgaaatatctgtcgaaatgctgaataaaatgactgaaaatctctgacatctgaaacaatccttttcgtttattaaggcctcacctgtttagacaaacggctataaaaaaagttttacagatcggaacatttttcctctattatttctcccgacttcatttgtcatttttttcagaataaatcgcatcattcgactcatgtttgattcaacacgtgcctctcggcttatcccctgacgctgcccgcctgaagcctttacgggacgattctatcaattcatcagcgaagtctagttttatattgcagaatgagagaatgctggtttattataacaatataagttttcattattttcaaaaagggggatttattgtgggtttaggtaagaaattgtctgttgctgtcgccgcttcctttatgagtttaaccatcagtcttccgggtgttcaggccgctgagaatcctcagcttaaagaaaacctgacgaactttgtgccgaagcattctttggtgcaatctgaattgccttcagtcagtgacaaagcaatcaagcaatacttgaaacaaaacggcaaagtcttcaaaggcaacccttctgagagactgaagctgattgaccacacgaccgatgatctcggctataagcacttccgttatgtgcctgtcgttaacggtgtgcctgtgaaagactcgcaagtcattattcacgtcgataaatccaacaatgtctatgcgattaacggtgaattaaacaacgatgcttctgccaaaacggcaaacagcaaaaaattatctgcaaatcaggcgctggatcatgcttttaaagcaatcggcaaatcacctgaagccgtctccaacggcaacgttgcaaacaaaaacaaagccgagctgaaagcagcggccacaaaagacggtaaataccgactcgcctatgatgtaaccatccgctacatcgaaccggaaccagctaactgggaagtaaccgttgatgcggaaacagggaaagtcctgaaaaagcaaaacaaagtggagcatgccgctgcaaccggaacaggtacgactcttaaaggaaaaacggtctcattaaatatttcttctgaaaacggcaaatatgtaatgcgtgatctttcgaagcctaccggaacacaaattattacgtacgatctgcaaaaccgacaatataacctgccgggcacgctcgtatcaagcactacaaaccagttcacaacttcttctcagcgcgctgcggttgatgcgcattacaatctcggcaaagtgtatgattatttctatcagacgtttaaacgcaacagctacgacaatagaggcggcaaaatcgtatcttccgttcattacggcagcagatacaataacgcggcctggatcggcgaccaaatgatttacggtgacggtgacggctcattcttctcgcctctttccggttcaatggacgtaacggcccatgaaatgacacacggcgttacacaggaaacagccaacctgaactatgaaaatcagccgggcgctttaaacgaatccttctccgatgtattcgggtacttcaccgatactgaggactgggatatcggtgaggatattacggtcagccagccggctctccgcagcttatccaatccgacaaaatacggacagcccgaccattacaaaaattatcaaaaccttccgaacactgatgccggcgactacggcggcgtgcatacaaacagcggaattccgaacaaagccgcttacaacacgattacaaaaatcggagtgaaaaaagcggagcagatttactatcgcgcactgacggtatatctcactccgtcatcaagctttaaagatgcaaaagcagctttgattcaatcagcgcgggacctttacggctctcaagacgctgcaagcgtagaagcggcctggaatgcggtcggcttgtaaacaagaaaagagaccggagaaatccggtctcttttttatatctgaacatttcacaatggcttcaccatgatcatatatgtcttttcccgatcgtctttttcaagcttaagctgttcaaagccgcattggcttaaaaacaaaacccattcctgcctgtccaggggaacggctgaaaacatcgctttatgctctcctctcagccggcccgcaatctcttcaatgaccgcgcgaccgattcctttctcttttgcctccggagcgacggccacggttccgagccacggttttccgtttgaaggcgcccattccaaatgaaaactgacggcggcaggagcgccgtcaatctcccatacgagccacgttccattgtacatggagtatgcaagcataaactccgccgcattttttgttccgaactcttcgtttttccacaccgggtgtgatgccgccagctgctccagaaacccgagatcttcttcttcaaaatctctacctgtcagcatgtaaatagtcgtcaaagataattttatgtatagccggattgcccgcaagcacgctgtggttgtctaaaaacgtgaacggttcgccgtctgtggtcgtgtaaatgcccccgacttcgttcagcagcacgcagccggcagcgtaatcccacggcgcgagcctcatcgtaatgtatgcgtcaatgcggccggccgcaacaccggccagctcaagtgccgccgaaccgtaggaacgcgttcctctgacccgttttacgagcggcgccaaaatactcgggtcaatccttctgttttccgtcacccatgtggcattgattgcaataatggcttcttcaatggaagcttcttttaaaggagcaagcggcgtatcattcagataagccccttttccgctgaatgcgtgatacagttcgtcctgcatcacatcataaattaagccgattttgccttttccgtcttcaaagatgccgatggagatcgcgaaatgccgcttttgatggacaaaattcatcgtcccgtcaatcggatcaatgatccagacgattccgtcaagggagcggagtttatccccctgcccttcttctccgagaatccggtgtccgggaaaagttccttgtatacggtcaatgaaaaagcgctccgtctctttatcaatatttgtgactaaatcattcggatttgattttgtttcaatcgtcaagctttcctgcatggattgtctgattctcgttccggcttcttttacccattgttttgcgatatcatcaatttccgtccaatttgtcataccgtgtacctcttttctatgtatagcttattctatagcatactgataaaggcgatgaaaaagcaaggaaaatgaaaaaaatgccttctcacgtaaaaacgaaccatttcctgcggttcgtttttactattctttatccgttaagccgaatccattcttttctgagacgttccagttttcttttgctgagatcgatttgatcttcattctctttttgcatggcctcgtacagggttgccaattcataatcaacctctagtctccagacagctacacggttatttttttcctccctgaatccttccttcaccacttgcctcattgtctttcgccccttccagagatcatttgttaaaaaagcatcccatttttccaattcattaatgatacttcttatatcgtatggaaacttatattcggctgtaacaacattcttaaaattgtgtgtttacctattcgttttttaccaccattcctctcgactcaaacgttctcaatgtttttgcggcgggcggcggctgtggtaaaatatgaatacttacgttaaggaggaaaaagatgactcagatgcgttttacaaaagaagacttcgatacatttacaatagaaggtttagatccgcgcatggaggtgttaaaagaacaagtccgtccgaagctgaccttgttaggagagcatttcgcaccgacattgtcagcattgacaggagatgaaatgttcccgcatgtcgccaagcacgcgagaagatctgtcaacccgccggctgacagctgggttgcctttgccaacagcaaacgcggctataagaaactccctcactttcagatcggtttatgggacacccatatgtttgtatggtttgccatcatttatgaatctccgataaaagaggaatacggcagattgctggaagcgaagcaggaggaaatcacaaaacagattcccggtcattttgtatggtcgccggatcatacgaagccaggtgcgtacaagcagtccgacatggatcaggagcagctgaaaacattatttgaacgcctgcagacagtgaaaaaagcagagcttttatgcggcattcagctgcaaaaagaagacgtgatcaacatgaacaacaatgaattcctgcaaaccattgaagatgcttttaggaagctttcctttttatacacactgactcagaaagtctcataacataaaaagcgggccgattgccggctcgcttttgtctacattttgataatcgcttgatctgattgtttcgcctgtttcacagtccgatacggggaataggtgctgtcagcttcaaattggctgcagattttcttttcttccgctttcccgggaacgatttctttaaagcggcggtacgcattcagaagtctgtctcggtcagctcctttttcataggcgttttccacctgctgaaaaaaagcaatgacatccacggcctcctctgtcgtccagtcctcattcatcggatattgatattccaaatgtcttcactcctttatcatcatgctcaaaaataagcatcttccatagatcataaattgttctttactttctttcaagttcataatataattcatttgttttacgtttaaaaaacgggtaataaaactgaatgtaatacaaactaatccgtaggtattatgataaaggtgggaaaacaattgccgcaacatgaaacacccctgtacagcggactgaaaaagcacgcggacagacagcctgtccaattccacattccgggccataaaaaaggcgcgggaatggatccggaattcagacaatttatcggagaaaacgcgttaagcatagatttaattaatattgaacccctggatgatttacatgcgccaaagggcatcattaaagaagcccaggatctggccgcggaagcattcggcgcagaccataccttcttttccgtacaagggacgagcggcgccattatgacgatggtcatggccgtatgcggacccggagataaaatcatcattccgagaaacgttcataaatccattatgtcggccattgtattttccggagcggtgccgatttttatacacccggaaattgacgatgagctcggaatttctcacggcattacgcttgagtccgccgagcgggctttgacggaacaccctgacgcaaaaggcctgcttgtcatcaatccgacatacttcggtgtggcagctgacttgagcagcattgtaaagctcgcgcattctttcgatgtgcctgttcttgtcgatgaagcgcacggcgtgcatattcattttcatgataagcttcctctgtccgccatgcaggcgggcgctgatatggcagccacaagcgtgcacaaattgggaggctccctgacgcagagctccattttaaatgtgagagaaggccttgtttccaaagaaagagtacagtcgattttaagcatgctgacgacaacgtcaacatcctatctgcttctcgcttcactggatgtcgcaagaaaacgcctcgctacagaaggccgcgatcttcttgaagatacgattctgctggcggatcagacacgggaacgcctcaatcaaattgaaggcatccgctgtgtcggcgaagaaatcactgggtcaaaagctgccttcagttatgatccgactaaattaatcatttcggtcaaaaacctcggcctgacgggtcatgacgttgaaaaatggctccgcgaatcatttaatatcgaagtcgagctgtccgatttgtataatattttatgtattttcacccccggagacagagcaggagatgccgaccgtcttgtaagcgcgcttacagacatttcaaagcaggcttccgcaaatgattatgctcatcagcaaacggaagttctgcttcctgagattcctctgttagcgatgacgccaagagacgcgttttacgcaaatacggaagtcattccgttaacagaatccgcgggacggatcattgcagagtttgtcatggtgtacccgccgggaattccgatctttattccgggtgagatcattactgaagaaaatatcagctacatttttaaaaacttggacgccggccttcctgtgcagggtcccgaagatgccacgcttgaaatgatcagagtcatcaaagagcaaaaagccatccaataaacataaagaagcccgaaacgaaatcgtttcgggccttttttacgctttttactcttcttcaagatgacactggcattgtccgcagcatgttccgtataacgtcgtgaccttctcatcctcaaagtaatgaatcgcttcgttacagtcttggcaaacaattgtacccatctgtcattccccatttctcagaatttgaaaacgcttaatttttacttgttgttattatattattatgtcacatttaatatgtcaactgataaattgtataacacatttattttttacggtctttttatagctcgagggttaatcacggtatatcctttatgacgcaatccttttacaatgtccggcatggcttcagccgtccatttccggtcatgcatcaatatgttggcgccgtcccgcaggtaaggactgctcagtgtgatatcggtaagcgcttttttggattgatatttctgatcccaatcatacccgaaggtccagttcattttcaccataccttctttttttataagtctgtcactgtagtccgtattgcttccgaaaggcgccctgaaaaatgcgggtttctctcctattaccttttcaaccgctttattgacgccaatgatttcttcccgttgtttttgttcggaaagatcttttaagttttgatgagtcattgtatgatttccgatcataaaacctaactcatgaatatgcttaagcgctttcttattttcatcttttttcaaaaaatgtccgtttacaaaaaagatcgctgacgcattgagatcatgcagtttgtccgcaatctcagcggcatgctgatcaggcgcgtcatcgatcgttaccaatgcgatcggttttttctctttctgttcatccattttttccacagaaaaggttttcggattgatatagtaacggggctccgccttctgttttttctcttttgtatgatggttttcccgtttggcatgattggccgcggcttgagaatggggtttgtttgtttgcatcttttcatttgattggcagccggcgagtaagcacatacatatgacggctgcaatggctttatacatgcaatccctcctgatatggttttgcccccagtataacgaaaaaacagcgctctcacgaaaaacaatgtgccttttttacacatcggctgtgcaagttgtcacacgtattatttcttcattaaaaacggtttcaattatataacaattcagtaacaagccttaggtttttcacctctcgtgatacacttaatatagtccttataaatggatgaaccaatatattatataaaacagaggagtaagatagatgcgctaccgtacggtgattcccttttttttgatgctgttcgttctgtcaagctgttcggtttctactgtcattccattcaaaaataaccggatcgacagcattcatcacactcaaatcttgtttttttccgatgaaaatcatatagataaagaagttccttattacgatgcgattcttgatttagaaaagaaatatccccatcatgtcgatcaaatgaaggtttatgacaacagaaagggatgggaagaggaaatcaacacgttccctgcgctgatggtgatcaatcatcggcatgtggtcatgaagattgagggatccgtaaagaaaaaagaggatatcatcaaacctatgcagcatgtgcttgcacaataaaaacagcccccgcttttacaaacgggggctgtttctttgttacatcattattttacgatgtggatcgggcttccgattgctacttcggcagcttccatagtgatttcgcccaatgtcgggtgagcgtgaattgtcattgcgatatcttcagcagtcattccgccttcgatcgccaggctcaattcagaaatcatgtcagaagcgcttgcgccggcaatttgcgcaccgattacaagaccgtcttctttacgggtgatcagcttcatgaagccgtcagtttcgttaagagacagcgcacgtccgtttgctgcaaacgggaacttagctgcaacgacttcaatgccttcttctttcgcctgtgcttcagtgtaaccgacagaagccagttcaggctcagagaatacaaccgccggaataccgaggtaatcgatttcagccggctctcctgaaatagcttccgcagcgattttaccttcgtaagacgctttgtgagccaaaggaggtccgtcaatgatgtcaccgattgcgtaaatgttcggtacgtttgtgcggcactgcttgtctgttttaatgacaccgcggtcagtcatttcgataccgacttgctcaaggccgagctcatcagtgttcggacggcgtccgacagtgattaatacgtaatcagcatcaaccgttttttcttcgccttttacttcgaatgtaactgttacgccgtcaggtctttcctcaacgcctttagccatggcgcttgtatggatttcaacgttgccttttttcttcagtctgcgggtaacgagagaactcatttgtttttcgaagccaggaagaatttcatctccgccttctaaaataaccaattcagttccgaagttcgcatacgctgttccaagctcagtaccgatatatccgccgccgataacaacgagctttttcggaatttctttaagcgccagtgcgcctgtagagttcagaacgcgttcgctatatttgaagtttggcaattcgataggacgagaaccggtagcaatgatcgcgtttttaaatgtgtatgtttgcgcagagttctcatccattacgcggacagagttgctgtctacgaaataagcttccccgtttacaacgtccactttatttccttttaaaagacctgcaacaccgccggtaagcttatttacaacagaagctttccattcttggacttttgtaaagtcaaccgttacgttctcagcagtgattcccatgtcatctgaatgttttgcattctcgtaacgatggcctgcattgatgagcgcttttgaaggaatacagccgacgttcagacaaacgcctccaagagttgctttttcaacgactgttactttttgtccaagctgagcagcgcggatggcagctacatagccgccgggtcccgcaccaatcacaagagtatctgtttcaatagggaaatctcctactaccataacattacgcctccattaaaataagttgtggatcgttcagtaaacgcttgatgtggtttaacgcattttgtgcagttgctccgtcaatcatacggtggtcaaagctgagagaaagagctaagacaggagcagctacaatttcaccgtcacggacgatcgctttttcagcaatacggccgataccgagaatcgcaacctctgggtggttgataaccggtgtgaaccattggcctccggcagaaccgatatttgtgatcgtgcaagaagcgcctttcatttccgcaggtgcaagcttgccttcacgcgcttttgtagcaaggctgttgatttcatcagagatttcgaaaacggctttacggtcggcatttttcactaccggcacaagcaggcctttttcggtatccgctgcaattccgatgttgaagtaatgtttttggatcacttcatctgttttatcatcaatcgatgtgtttaaaacagggaattttttcaaagcggatgttaatgctttgacgacgtaaggcagataagtcagcttgatgccttgatcagcagcaacttgtttgaactgtttacggtgagcaacaagatttgttacgtcaacttcatccataagagttacgtgcggtgcagtatgcttagagttcaccattgctttcgcaatcgctttacggataccgctcattttttcgcgtgtttcagggaattcgccttcaggagcctgagctgctgcaggtttagctgtttcctgaggtgcagctgtttcttgcggtcccgcttcttgagccgctcctccatttgcaaagctgtcgatatcttcttttacaacacgtccgttattgcctgaacctgttactttacggatatccacgcctttttcacgggcatatttgcgtacggaaggcatcgcgatcacgcgtttgttcggatcagcttccgcttggtcctgctgtcctgcgccggtttcttttgcaggctctttaggagtctcttctttagagatatcctgccctgcttcagcagacgactgaacttgagcctcagttttcgcctctcctgaatcatggcttcctttaaattgaagatcttcgtaaccaggtgcgtcaaacgtaataatcgtttgtccaacagttgcaactgttccctcttcaacttttaattctaatacttttcctttaacaggtgaaggaatttctaccactgctttatcattttgcacttcagccagaacatcgtcttcttctacctcgtcgttcggcttcacaaaccattttacgatttcgccttcgtggataccttccccgatatccggaagtttaaattcaaatgccacagttttcgacctcctagttgattaagcaaattttagttatgcatacgcaagcattgaacctagtaaacagactccttcatcataagagaaaaggactctctttaccgtcttttaagatgcctgattaaaattcaagaacttttttcgcagtttcaagaacgtctttatggtttggaagccatacgctctcagcaagcgagaaaggaaatactgtatcaggcgccgcaacacgcagaaccggagcttccaggctcagaatcgcgcggtcattgatttcagctacaacgttggcagcgatgccggcttgtttttgagcttcctgcacgacaattgcgcggcctgttttttcaacagaagcaataatcgtatcaatatcaagcggacttacagtgcgaaggtcgataacttcagcagaaacgccttctttttcaagctcttcagcagccttaagcgactcatgaaccatcgcgccgtatgtgatgatagaaaggtcagtaccttcgcgtttcacatcagctttgccaagctcgattgtgtattcctcttcaggaacttcctgacggaaagaacggtaaagtttcatatgctctaagaaaacaaccggatcattgtctctgatagaggcaatcagcagtccttttgcatcgtaaggagtggaagggataacaactttaatacccggctgctgagcgataaggccttccaaactgtcagcgtgaagttcaggtgtatgaacccctccgccgaatggagaacggattgtcaccggagaagtccagcgtccgccggaacggtagcggagacgagccatttgtcctgagattgaatccattacttcatatacaaatccgaagaactggatttccataacaggacggtaatcttgcaggcctaaaccgagagcgagaccgccgataccggattcagcaagcggcgtgtcaaatacgcggtcctcaccgaattctttttgaaggccttcagttgcacggaatacgcctccggcaacgcctacatcttccccgaaaagcagaacgttttcattgtttttcagttctgtgcgtaacgcatcagtgatcgcttgaatcattgtcatttgcgccatggcttacttcgactccttcgctttgtaaatttcaagttgttctttcaagttgaacgtcggctcttcaaacatattctcaatcagctctgttactttcggttttgattcgccgtcagcctttttgatagcttgtttgatttcttctttggcctgttcaatcactttgttctcttcttcttcagaccatagtcctttgttttccaagaacttgcggaaacgtacgagcgggtctttttgctcccattcattttctatttctttcgtacggtatttagtcggatcgtcaccggacattgtatgaggtccgtaacggaatgtaagagtttcaatcagagtcggaccttcaccgttaattgcgcgctggcgtgcttctgcggttgcagcgtaaacggctagtgcgtccattccgtctacttgaacacctgtaataccgacggcaactgctttttgggcaattgtctgtgcggatgattgcttttctacaggagttgaaatcgcatagcggttattctgaacaacgaagatcgccggcgctttaaatgctccggcaaagttcattccttcatagaagtcaccttgagaagctccgccgtcaccagtgtaagtaatagctaccgcttttttaccgcgctttttaagccctaaagctacacctgcggtttgaataatttgagcaccaataataatttgaggtgataaagcgtttactccctcaggcatctgattacctttaaaatggcctcttgagaacaggaatgcctgatgtaaaggaagcccgtgccaaatcagctgaggaacgtcacgataacccggaaggataaagtcgtcctgttcaagcgcgaagtgtgatgcaatttgagaagcttcctggcccgctgtcggtgcatagaaacctaaacgtccttgacgggaaagagaaattgaacgctggtctaaaatgcggatatacaccattcttctcattaattcctttaactgatcatctgaaagatcaggcattgcgtctttatttacgacttctccttcagcatttaaaatttggaacgtttcaaactgcttattaatagcatcaaattgttttttgctatcaacaattgaagtttttgtctttgcagccattttttaaaccacctcttcttttgatttaacagggttaggataccgtttagccatccgtattaaaaacagtcttatcatgctctgcaattctaaaattaatcattcagaaattcacatagcgcttaagcaaagataatgacgtttaaactgtactaataaaaaaagattttttattagtacaatatgatcaacaaccatagtttacagtaattaaacaaagccgtcaattatttataaccttattttgaaaccgcttataaaacttaagatcatactgcgccaaactgtactataaaagactttaaactgtattataaaaacgctctactgtactataattaaaaaaaattacaaagagtaaattaagttatttaacttcgagggcaggctttgagaaggtgccgcgggataaaaacgggcagttagcaatcgtcccgcctgccgaacaggcgggacgatgcttttgtctaattattcaatacccgcccacacgatattcagcggcgtcagtacggcatgaggatgaaactcggaaatcggagtgaaaaatacatacgtaaaatcttcggctggatcagaaaacatgccgcaccaacccattccaagatgtgagaacgtgccttctgtcatgaaataatggtcaccggccggccacaaattaatgcctaaaccaaagccgccctcctctcttggcgctccgaagaagtaaaaaggaagaccgggctttatttgatttctcagcatggcctcgactgtttttcttccaagcagcttcttatctttcaatctgcctttatttctaaacatttcagctaacttccaaatatcttccaatgaagagtacagaccgcttgtcgctttattcggaaaatacgggtgatgacttttttccagctgtacgcactcgtgctcattgatcacacaaacttcttcttttaaagcatcaggcacataaaaaaacgttctttctaatccgagcgcttcaataatatgctttgttacatactgttcgtaggacatgcctgttactttggaaataatgatgccaagtatgacaaagccggttctggaatagttccatgcttcatccactccgtactctaaaggcgtactgaccagatagcttatccattcttcctcattcgttaagtcaatgccttcagccttttgaatatccagctcaaaacttaatcccgccgtatgagtcaaaaggtgtaaaattttaatgtctccgaaacccggtttatcaaatgcaggcaaaatgagcttgaccggcattttcagatcgagcagacctttttcgacgagctgcatgacggctgcagcggtaaacacttttgtcaaagaaccgatttctctgattgtatcaagctgaaatgtttgcttttctttttgtccgccggtaaattcccctaacgactcagccgcaaaaacctcgcctcctcttgatatcatataactcgcgcattgcagatctccattgtctatcatcgtctgataatggctgttaagagcgttaatttgtttcatatcaaatgccggattgcttattgtttgtttcattgttttctccccctgtactgtatgtatcgttttcatcccttacttactgatttcttgatgaattctgacaccgctttattaaattcttccgggtgtgtgatgttcggaagatgccccgctcccttaattttctttaattctgcattgctcagcagtttcttcagcctttttgtttctttctgatcaactacgctttccttctctcccgtaaggataagcgttcttgtataaatgtcttttaaaaagccgatcgtagaatagccttcttgttgatgtatcttcataaaacgttcaatagaagcatttaagaattgattcctgtataaactttcatattcatgcgattttcctatagctataaaatcatttttcagtttttcctcaacactgctttcagggtcttcttcgtattcggtgtaacttccggaaagaatgagtgtttttactttttcagggtattcataggctatcctctgtcctatcatgcctccccaagaagctgccgcaatgtggatcggccaagcaacccctatctcgttcagcacttcaataaaagtctgagccagcccgctcagtgtaaaatcggcgctcccctcactcagcccgtaacccggtgtgtgtatgacaattacattaaattggtctgcccactccttcatttgttctttccacatgtaagcagtggtagcaaaaccgcaaatcagtaaaattgtttcacccttaccgctcatcaatatttccatatgccgggcattttctgtgttagccagaaaatgaacggtttccgtttcttctgtctggtaaaaagcgatgagtttttttgcggcatcgctttgatcgtgctgaagggctcctttcttcagtctgctccaataatgcaaataatcgtctagatgacgattggaagctgtgccgagtattcggaaaggactttcagcttcttcttccgtaacgattgacgaagcatcaaaatcggctgcaatcgctgaatctcttaccagaggcggtgctgaacgggcggataacggattgaaattattttgtattttttctttttctccgtataacacgatcagctggtggccttggccgagaagcgagtgttcaaaagctttgattccggcagtattttctaatgggtgaagtccgtactcggttttcataatgtcttgaatgccggcatcaactgacatgcctccgtctttccagaaaggccaatttacagcgatggtttttcctgatctcccccctcctttctcatacattccctccactcggcaaaatgctccagaaaacgattggcgtaggcgtaatcagcttgacccaaacttccgatttctgaagagatggaagaaaacaaaacaaaaaagtctaaaggcatatttctgagcgcttcatccaaatgaatcacaccattgacctttgattgcagcaccgcctgagcttccgcgtctgttttattcataatgaaagagtcttttaacacgcctgcactgtaaatgaccccgttgatttcggaataatcagcatgaattttttccgctaaattgatgacctgctgtttatctgacatgtcagcctggatgtaagaaatgtttgccccgtcatatcggatgctgtctaatttttcttccatttctgctgtcattttcgatcgtccggcaatgataacgctggctccgtgatttgcataaataaacgctgaaataatccagccgatgccgcttaaccctccgattatgagatacactccgttttttacaaactttgcggccttttgccctggttgcagcgaagcatctttgtatgctgtcacccgccttttttgatcgccgtcatatttcacagcctcatgatgtccggcacttaattcattgagaagcaaagatgctttttcaatggtttgtcttgaagaaatctcaaccgttttacactttatattcggctgctccgcattaagcgttttaaaaaagcctccaatcgcggcgtaaatcggatttgtatattgatccttgtcatgtacgtacaaaaggttgatgttatcttttattttttgacggatcaacgctttacttaaataaaggattgaataaaagctgtgagtcaaatctaacgctgcctcagtataagcttgttttgacaggtaatgaatgattgacgccggaaacgctccggactttttcatatcatctaacagtctggtgtaatgagcagactgctccggattaaatttataatgcttttcatttaccatttcatattcagcggcggcttccgcataaataacattttcactgccgatgtactttcggatttcatcactcaatgaactgccgaaatcgaaaatcaatgtattttccttaggcacttctccggactttaatggcgattctatccattctttttgtaaatataaagattcaagcatcggcttttcagacggctctttcgtttgcgttttttctttaaaagctgcggccggcgtattacgcacatcatatttttcttctaaataagctgctaaatcatgaatattgttataatcaaaaagcaatgtcggatacaattgtgtatccaatctttcctcgagcattttcgatatatgcagcagctgttttgagtcaagacccagttcgtaaaaagattggtgtttgtccgctttatttggcggcgtgtttgtcacatctccaataatggatgacagctcatctgttaatgttttttgactgtcttggtgctgaactgtatcagagatagagtctgtaacgcgagctccgtatttctcctgcagatattccgtcaattcaccgattgtggagtaatcaaataataaagtcgggtacagctttgaacctaacaacagttctaattttttagataagtctaataactgtttagaatccaagcccatctcgtaaaaggaaatatcattcttcaccgtttcagcaggcttttcaatcatgccggctatctcttggattaaattatttctgatcatttctttattgttcgttacgctgccgacgtctttagctttttgggaatgctccagcctttgtattgatttttcatttctgactcttttcacaccgaatcgctcataataaaaagcaagctctccatcaggcctgtatacttctatgtccgcatataaaatgtctttagaaggcggctgcgttatactgtttttatcaatatacacaaaacaagacccggttgttttatgcagtgcccggaatgtctcaatatatatagggataaacgcatttgttccttcatccggcaagtctgatgtaaggactcccaacaggctgagagatccatccaaaaatgcggggtgcatgtaaaagtcatctgtatattcttttgaaagtccgcttaaactgacctctcccagaatataattttcaccttcatataccgtaccttccaatttcataaaatctttatgaatcaggccgcccctgcgcaaattacgataggcggcttcagcattcgaagtccggacggcccctttctttaatgcttcgattgaaattgtcttttcgtctatcgcattttttcttatgatttccgcctgcaagttgactgacgcttcaccttccgccttttcagcgacccatttcctgcttgttgtttcaacaagccagccgttttcttgttccgtaaactggaaggtgacttttttatcaaaatggactgacgtcgcaacaggttcacggaataaaacatgtttgatttcaaaacttcggggtgatatccctttctcagctaaaaatcgtgttattaaatccagatacgttacgccgggtatcgtacgcacttgatgaaggacatggtctgaaacaatataatcgtcatgtttgactaatacgctgaacctcatgcaactcgacaacctttcttcttttacaaagtaaagaaacagagcaggtgctactctgtttcatcaataatttcaagaagccgttttttattctgtttgatttgtttttttcgatttgaatccggccagtactcttttctgacaaactcggcaggcggcagcggagttctgacggaatgatatgaatcatccaggccgcttaccaaaaggtgggcgtttgttccgccgaaaccgaaagcgctgatgcccgccctccgttttccatccttccagcttctcagttctgtattcggataaaaaggcgacttttcaaattcaaagcggggatttggcgtttcacaattcaatgtaggcggaatttccttatgccatattgataaaatcactttaatgaaacttgccgctccggcggcgcttaataagtgtccgatattggtttttacacttcctactccgcaaaattgcgttttgtttgtgtctcttcggaatacttttgtcagagcctgaagctcaatcggatctccaatcatcgtgcctgtgccgtgagtttcgacgtagctgactgatccgggagtgatatcggctctttcaaatgcatcttgaataacctgctcttgaagcttaggattcggagtcgtaatccccattgtcgcaccgtcgttattaatagctgatgcttcaatgataccgtatatccgatttccgtcagcttttgctttctccagcggttttaaaagaacagcgccaaaaccctctccgggtacaaagccgtttgccctttcatcaaaagtaaaacactgaccgtccggcgaaagagctcctccttctgttaacatcaggtaaggaatttcatccaaaagcagatccgcccctcctgccagcgccatttctgaatcaccgttttttatgctttggcaggctaaatgaatgctgactaatgaagaagaacaagcggtatcagacaccatgcttggaccgtgaaaattaaagaaatgcgacacatgtgaagcaataaagttttgactaagcccgacgatgtggctgctgctttctttcggcagtttgtgaccgtagccgcccattctggaaccgacaaatacgccgactttttttcccgataattctgtttcttcataaccggcatcacgtacagtctgtacactcgtttctaagaaatgtcttatcagcggatccgtttggatggctttctcctcttccatacggaaatactccggatcgaagctgccgattccattaataaatcctccccatttgctgatgctttttcccttttgctgcaccggagagtaatgttcttctatattccaccgggaatcaggtacttctttaatatgattcttcccttttctcagattgtcccaaaattcctctttatcagccgcgcccggaaacttacatccgattccgataacagctatctttgcagtggaagccgtctgcggttctgtatttcggctcgtcacagactgcatatcatgctgattgctgctttgagaatcagtctgttcgatttgttttttcaacggcggcgccgtcttaccgatatattccgcgagaccatgaatcgtgttgtgttcaagaagcacagtagggtcgatttttttctgaatcattgcttctatacgatgtataatgctgacaagaagtatagaatccacaccgtattcctgaaaatccgtatttgggttaagcttttcaaggggtatgctcaattcctcggcaaatacggcagaaagttcactgacaagcccttctgaatgatcaaaagtgccgggagtctcctgtcttcgggccggaaatgaagtcttgccggttttattgatgttcaggagactgtctgcatgaaacactgttccttttttcacgataggaatgatattggccgattttttctccagtgcatgatacaaaatcgccagtccttcccgcgtggatagagagtccaatcccaattcatcatataaaggactcgtcacagtacccattccgacttctttccagctcggccaattgatggacgtgaaatacgttctccccttttgaaaatgataagccgcgaaatagtccatatatgcatttgcagacgcgtaatcagtcattcctttcgacagtttgggtgactgtgctgcaattgatgaaaacagaataaagaaatccagcggcctattattaaaaatccgctccaaattctgaagtccagtgactttcggcccgtacaccgtcttaaattcactcattcttttatgaataaaggccggatttccgccgctgtgcagtccggcacagtgtatgacaccgctaatatctttaaattcaaggcttacttggtgaaagaatgaacgaagcttctcttcatttgtgagagaaccgctgtaatacagatagtcgacacctttttcttcaaaactttgaaacagttttatattgctgactgtcttttcgtcctgtctgccctctttcagcaaatgatcccattcacttcgcaaaggtaatggacgcgtacccgtcagcacgagttttttcactccccgtttcaccaaatcttcagctattgctctgccaatgccccctgtcccgccggtaatgacgatggctttatccgcaggaaatgaaacaggaccgccgccggtatcgattctttcttcttcaaaatacggaacatatctgacgccgctgcggtagcatacttcattctctcctgtacattgcgccctttcaatctcaaagatttgtttcagcttatgcgtttctttcatgctgtctatatctattgttttcacatgaacaaagccgtattccgcagaaagggctttcagaaaagcagctgattctgcacccgtcagctttggtttttccgctttaaatacctgcaagccattggttagttgtaaaatggataatggtgtttccttttttctccgcttaattatttcttgtataaataagaatttaccatatgggatgccgttctgattttcactctggtttccgatatctgagaaatcaaatatattttcgacctgccgctcaccgcccgagaagatctcacagataacgtcgtatgcgtggttttcatctaataaagaacactcaaacatttgatcagagtgttttatatatgaagagtgatgttttatgacaatcagattctcctgatctatatccggacaaatggtgcgggcaattgattctgtgtcttgattcacaaatgcgactgtcagtccgtactcttttgtttcggatggatttacaaacggattctccctccattttttttgcaagtgatgttgagaagaatgctgagggatctctgtcctctcagtcctggacggaacccaataacgttcttttgcaaacggataagtcggaattgagatccgtttacccggctgctgtaaatgttgatgaacggatttccagtcgatatccgccccccaaacccataattgagccagcttttccgcttcaccgttctcaataatggtctttacaaacaattcgcctgctctgccttccgttaacgccttcattttttcagcaaatgcatctgattgctgattaacatatacgcctggaacttgcttgtcaccgcggcaaaactgagataatttatctttcatttctttaagagaggtaccggtaatcgccgctctggcctccatcgcttctctgcccgattgtgtagtgtatgccagatcccgtaaaacgacgctttccgattggccgccttccatcacttcattcgggaacatgtctcttatcgctccggcatattccttcagtaagtattcagtaaccgcttgaatggaggggcaatccgttaattcatacatcgtgagttcaatatgaaacatttcgttaataaaatccgccatccggcttaattccaaaggccctacgccaaattcactcaggtgatcagaaatattaatttcttccggatggatatgaagcaattccgaaacaaacggtttgagtacttcattcaccttttctttcatatcagtctgtttatcctttacttcaggacttagtgaacgctgaataaaatctttcatgttttcggcatactcaagaagacgttcattgtctttggcagataacaggacaatatgcggttcgttctcaacatgttctgttgagacgtttgtttcttcatattcttctataatgatatgaacattcgttcctcccgctccgaatgagctgattcccgctcttctcggaacagttactgtttttccgttttcctgcagtttcggtttcttccagtcttgcaatgaccgctgtacataaaagggagatgctttaaaatcaatatttggattcaacgtctccgcatgtatggaaggaaacagttttttcagtttcatttgcaaaagaacctttgtcaaaccggcaattcccgctgcggcctcaagatgaccgatatttgatttgacagaaccgattgaacaatattgagtgtgctccgtaaattcccgaaacgcttttgttaatccggtgatctcaatcgggtctcccagagcagttcccgttccgtgagcttcaatataactaattgtacgagggtcaatacaagctttctgaagcgcgtcctgtatcagttcagactgaccatttggattaggaaccgtaaaaccgtttgttctccctccgtgattgaccgctgtcgctttaatcagcgcataaatatgatctccgtcccttaccgcttccgccgccggctttaaaagtacggagcccactccttctcccggtacataaccgtcaccgccctcgccgaatgtacggcatcggccatcacttgcaaagaagcggctttgatttaataatgtatatttattcggatgaagtgtaagattgactccgcccgcaacagcaagtgtgctttctcctcttcgtatactttcacaggctaagtgaatggcgttaagagaggatgaacacattgtatccaccgccatactcggccccttaaaattaaagaaatacgatattctgtttgctattgcagaaaatggagacccgacggccagttcatttcctttaagtgattcttcaacgccgaaaaattgatagcttccatatgtgacgcctgcaaatactccgacctttttgcgggtcagatctgaaggtttataacccgcatcctctatggtattgtacactgtctctaaaaagagacgttcctgaggatcaagaaaagcagcttctttcggtgatatccggaaaaataaaggatcaaaccggtctggatttttcagaaaacctccccacttatagcagcttccctcgagcatttccttccggtcatcaggaatttcgcttacgcaatcccgtccattcatcagcacattctggaactctctgatgttttccgcacccggatatctgccgctgacaccgataatggctatatcagcagaaaggggatcggccgcaatgtgctcttttgaaccttctccttcagagcgtgccggcgcttttgtttccactggttttcttttttgctttttttgatatgaaacaagttcagatttgccggccgggttcagcagtttcatcattcgttcgctgtgatgactcaggaaatattcggctaactgcgatatggaatgatattcaaaaaataatgttttcgacaatctgccgatactttgctccagctttttggtcaggcgcatgatcatcactgaatcaatgccgtatttctccaggtattgtttttcatctatgagtgagaccggtaatttcaattcctctgacattatattttttagataactgatgatattttgtcttaattcatcgctttgtaaatcggcatcttcctgccggtctgaatgtaagctgattgtgccggcacgcttcagcacatcctcaatcttttcttttcggcctttcagggcgatcagctgttcagatgattgacacaagctgttctccagagcctgtattccgtcaccgtcatctagcgggtcaaggccgagttcctgtttcatgtaggatattccttcatcgtcaatattcatcccgccggaagtccatagcggccaattgactgacaccaccctttcggcagactcttttgcggtcataactgctgcatactgatccaaaaaggcattggcgaaagcatagtcacattggccggctgatccgaagactgccgatgtggatgaaaacaagacaagtaattcaactttcatttttttgatttcttccgccagccagagcgcgccataaactttcgaacttgtgacttgatcgatttcttcttttgtctttcttaagataaaagagtcacggagtacgccggcactgtgaaatactccatgtaaggtgccgaactgctcttttgcaaaagcaaacatccgttcagcatcactttgttttgaaacatcagatcggatatattcaactgttgaacctgaacttcttaaatattcgatcttttttttctgctcttcagttaaatcagagcgccctgtcaatatgagattcgctttccatttttccgacagatgttttgccagtatataaccgagaccgcccaggcctcctgtaatcagataattttcatgatgtttcagcggctgggttaaatcgaataagccggctttattatagcttttcgtaaaacgtctgccgttttcatagcgcacttcaaaatggatatcccgtttttcgtcacactctctctgatatatatcagctattgctggaagagcggctcccgcaccctctgattgagtgatattgataatctgatagtgaaaattggggtgttcctggtgaacggttttcaccaatccgccgagagcatgatgcagcggcagttgttctttattctgagtttgaaaaatatgcgtcagttttattatctttttccattttaattcaatcagcgcctgtgtaatatacagaagagaaaacaatccgttttccaattgtttctgtatacctcccttactcatgtcagcctgagaatcagaccacaagtgaagaatcttttcgggcggctgataatgatcatgaatgtatcggaacagctttagataatcgtcttttttcacgtggttcatacaaatcgtatcatcatgtaaaacagcaaattcttctccgcggatgacaaacaagagagtgcagtccttaaacaaaccgctcaattcttgtatttgccgttcattttctgcaaaaatcaggagcaatcccgtcaagggtacgctcttcgtactcggaatgaacgattctgtccattccggcttgtaatataaaagaggatggttcgatgcccgtgatttttgattctgaatggatgttacacgggcatagccttcgtcagccgacatttgtcctgtttgaatcagatcaagaatatcgctgatttgttcacgttttccgttcatcattcttcccccattaattgtttcaatacagccttctgatcaatatcattggtttccaattgacgcaggagacgaatgagttcatcgtccgtctgaacagtgtctttttcatgaccatatctgaatctcacatctctgcactccgccagaatgcttccgtttccatctgtaaatgtcatatgacacgttacatcacggctgttctgccggttcactttttgagtataaacataaaaattttgagcgagaggctgatagacatccgccgctcccattccgatcaattccgggaaggtttctccgctgacaaaaaatgcactggcttgaatcgcggactcaagcgcttcaggagaaatcgtaaaattttctctttttgcataaagctcatccggcattgaatgaagcgacagcattccgtaactgtttttcgctgattcaatgacaaaaggcgcttcagccggatgttcagtcatttctgatttgacttcagcaatatcaagcgcttcaggaagcataccgctttcaggcttaaccatatgcgcatttccgctggcaagacgtactttattctcattttttgtgtttgcatatatgtcaaaccgcgcaaagtcacgctcaggcgtcagcgtaatcatcagttcccgtatatctgtcattccgttcatgctttcggtccacaataaatcggtcaatgtttgaactggttgtccaaatgccgccgctgcattgacgatagccatttcagccaaagatgcataagggaaaaaggacacgtttccttcagacagacttagtgcgaacggatgattacggctgatttttttcgtgaaactgaactgatgaaaatcggacgtgttactccccaagaaagggtggcccgtcttactcacatccgctgaaacaagtgcttcccctttttccgctatccaataccgctgtttgatcagcggttgtcccgggatagaaatcctgcgggcattccgattcacctcaaaagtctcccaatctatctttcttccatttacccatttggatgctgcttcggcgtaatctgaacaaacgtgaggcatttcattgtgaacttctgattcgaatgtattaccggtatggctcaggctgcttttttcacccctgatataagctgaaagctcttcagcaatgacctgcccggaatctgccactatcgccagccgttcttccatatgatcgcgtcccgtctgaagtgtataggcaatatcctgaagacgcagtttatgattgttatccttcgattcattttctgatagaaaatcagccataacctttgcatattttatcagccgttgtttgtcttgagccgataaaacaaagatcactcggccgctttgatgatcaaatgcttttggcggttcatacgcttccaatataagatgcgcgtttgttcctcctgccccaaaagcgcttaccccggctctcaaaggatgaacagcatggctgttttgcggaatattccattcagccgctttccgctgcacttgaaaaggaacctgatcaaaatctataaacggattaacaatatcggaatgcagagaaggaacaagctgcttattcttcatttggagaagcactttcgttaccgcagcgattcctgccgcagattctaaatgtccgatattggatttcaccgaaccgatggcgcaaggatggttcaattgataggaatctttcagtccttgaatttcaatcggatcgcctaatgatgtccctgttccatgcgcttcaatataattgacggtgttcggatcaatgtcagctttacgaagcgcttctgaaatgacctccgcctgcgcatccggattcggtatggaatacccgctcgtctttcctccatggttaacggcgcttcccttaatcacgccgtatatttgatcttgatcttctattgcttttttcaatggttttaacaatacggctccgactccctcaccgggaacgtaaccgcttccgtcttttccaaaactccggcatctgccgtcacttgatagaaactgtcccatgctgaggaacttatatttattcggatgtattgacaaattcactccgccggctaatgccatatcgctctctccgcaatgtatgctttggcatgcgtaatgaatagaggtcaatgatgaagagcacattgtatccagagccaaactcggaccttttaaatgaaaataataagacacccgattggcaattgaagaatagacggaagccggcgaaaaagccgctccattttcttctccttcaaatagttgatattggccccacattgcaccgacaaatacaccgactttcatcttttccagcatgtttctcgggtaccctgagtcttcaaaacaatttttggccgtttctaaaaagagtctttcctggggatccataagttctgcttcccttggggaaatatgaaagaaaagcggatcaaattgatcggctccgctgataaaacctccccacttgctgtaagacttccctttcatatctctgtcttcgctgaagaaatcatctatattccagcggtcaggcgggatttctgtaatacaatcttttccgctctttaaattctcccaaaattcaggtaagtcttcagccatcggatactttccgcttaaaccgataatggcaatgtcttgatgccttgtatcagctgtttcatttatttggatctcacggctttcatcctccttgaaggtatcttgaagtgcagattccaatttttctttgtcaccttcaaacacgatcagctgtgatgcgttcatagagagtgaatcttgaaaagctttgatcccattggttttactaaggggaaccataccgattttttgtttcatccatttttcagtttgtttatccactttcatgccgccgtcttcccataggggccagccgatggctactgagacgccggagcgttcttttttccgcctcattccttcacgccactcagcaaaaagatcgatgaaccggttagccaatgcataatccgtctgtccgatattcccgtacatcgagctgcttgatgaaaacatcacaaagaagtccaaaggttcggtttgcagcaagctgtccaataagaccgtcccatttattttcggagcgatcacttcctgaatttcatcttttgatttttgaatcaataaagcgtcgtgcgtcacaccggcactgtgtatcacaccgttgatttctccgaatttccttttaatagtttttatgattcgctctgcatcgcggctatctgaaaaatctcctcttatatattgaacggaagaaccgcctgctttcattcggctgattttgttctttttgtcttccgtcagttcagaacggcccgctaaaataatattggctttcgtttgcgctgcgatatgttctgcaaatataaggcctaagccgccggcccctcctgtaatcatgtatactccgttttctttaaaggagaaatctgagttttgagccggttctgcttcccgtaaggcacggacccagcgcacatttccttcataataaagatcggtttctcccggatgcgcttcagttgattcgcatctgatgatttcagctgtaagagccggcaacgatgtcttgtctgaaactgatatcccgattgtcttaagggccagtttcgggttctcaagcaaaatagactgccctgcgccatggactgaagcgtaaagcggctgatcatttttatggtccgccggataaaggaaaagcgatacaacctttttttccgccttgctgcgcatcaatgcccggctgaaaaagaatagcgggtaagcccctttagaaagctgttcacttattttttccgggccggcaaatgatccttccggccacccgtacaccacggtgtcgggcatttgccccctttttttcagatcagctgcaagcctgtcaaagtgggcttcctccctgtgatctatctcataaattccgtctccgtgataggagaaacgattccctgataaaacgagaatgatctgtgtattttcgaatccattttcagcattttcccgcataaaatgaaaaagctctctgtcatattgaaacagcagacatgttcttttctttttatttccgcaatgcgggtcccaagcggcagccttttgtctccaatacggcgttaaataggtcagagccgtatgattctctccatgatgtagagggaggtctttgtcaacggaagtcttttcgccgctctccgcaaaataatttgcaagtttttgaatcgtcggatactcaaacaataaagtagggtacagttccctgcctgttttctcctccaatgcctttacggcttgcataagtgtgacggaatccaggccttgttcataaaaaccttttaccacagagagtgtttcaggggcagtccctttgatgtctgcgatcagctgctgaatgtctccttctgttataagagcggaaagattttcgttcttactttctttcatgtcaggcttttcagccggttgattttgcgttaagaaataactggacattttttgattttctttaatatacgcggcgagttcccggatcgttttctgctcaaacaggagtgtaggatacagctgttcccctgttttgttttcaagttctttgacaatggcaagcaaagaagcggaatccaggccttgttcataaaaaccaatgtctgtccttatgtcacgcagatctatatttgaaaccccggatattaattctttaaggtgtgtctcaatgctttcgcttcgatctatgattgaatcttttctcatcaggccgtcttttggctgagaagccgcttcagtttctaaacgagtctgcttcagattttcaattaaatcttttgagcgaatatgtttcacagacagccgtgtaaaataagcgatcatctccccgtgtgcatcgtacaaaccgtaactgacttggatgacatcccctgaatcatgattttggtcttgcttctctatgtacacataacacctgtcttccaggcgcttcgtcatacggaaagattcaatatgaatgggaatatacgttttcatccggcttgccggagatccttgtgtaaaatattcgggacatgcctgataaaggatcgatatgatggtagacgcatcaagaaaagtgggatgcaattgaaaatagccggtatattgtttggcaatttggctgagcgacaactctgcaagtacagaatgatcagacgcataaaccttccccagactcttcataaattcaaaatgctctatatcaaccttttttaaatagtcatagcatatctccatatcggcttcacggacggaggcatgtttgatttcatcgatatgaattgaactcatgctttccgggaatttctgcatgagcctgcagttcatattctcatcccagctttcatccagaatccggtcatcttttacctttctgctcttcgcctggatttcccatccctgttccaatccctgaaaacggatgcggatttctctgtcaaaggtgtccgatgttgctacaggttccaaatacaaaatattctgacactcgagttcttcaataggcaaacctttactcagcgccatacggtatatcatatctaaaaatgtgacaccgggtataatccgggtgccatgcacccggtgatccctgacaatatagtccgtatgtttaattgttaatgtgaactgatagttttgattactggccacctgtctcattccttttcttttctttataattctttgaaatcaagtaaaggaatcagcaattctgactcttccttttctggagcttctccattgtcgatccagcattgttccttattgaatataaccggagaaagcgggtgtctttttgtctctccatatcctaacgtgagatggctgtcgctcaatatcatatgtgcgttcgtgcccccgaatccaaaagaactgattccggctctcaaaatcccttttctgggacgccattcttttaaagacgtgttcggaaagaaaggcgactgatcaaatttaaaacgcggatttggcgttttacaatgtagtgtcggcgggagcatctgattttttatggataaggcaacctttataatactcgctatccccgctgcgctcattaaatgtccgaaattcgtttttacgctgcctactccgcaaaattgcgtttcttccgtaacctcccggaacacttcagtcagcgcttttaattcaatcggatctcctatcatcgtaccggtgccatgcgtttcgacataactgagagtatctgcatctattccgccttttttcagggctttttttatcactgcgctttgcgctttcggattaggtgttgtcatccccattgtctgtccgtcattattaaccgcggaggagtcaattaccgcgtaaattctgtcaccttcggcaagggcgtcatcaagtcttttcaaaaggactgcgccgcatccttctcccggtacaaatccatctgccttctcatcaaatgtatgacattttccttcaggtgaaagcgcccgagcctcactcagcatgacgtaaggcttttgatccagcaaaatgtcaaccccgcccgcaattgccatatctgactcttttgacatcaggctttgacaagcgagatggacgctgaccaatgaagaagaacaagccgtgtctacaaccagattcggtcctttcagattaaaaaagtgtgagatatgcgcgcctatgaaattttgtcctatacccacgatcgtattttttgaaggggaacctattttggacataaacgtcccggtgcgcgaaccgatgaaaacgccgacttctttgtttgatacttcttcctttgtatagccgccgtctctcaatgtctggacgctgacctcaaggcattttttgattaacggatcaagctctgatgcctcacttttgttcatattaaaaaacgcgggatcgaaagactcaatatcttgaagaaatccgccccacttactgatactttttcctttttcataggtgtcagagtagtatgaagaaatatcccatcgcgacgccgggacttcacggacactatgttgtcctttcttcaaatttctccagaatgtttctgtgtccggagcatccggaaactcacagcccattccgataatagcgatttgattcagactggttggttgcatttgagatccgctgtcccgtacttcggaagcattttgatttatatgttgctctttattccgaacctcaatattttctgaatcaatttgaggactgatcccctcacttgcaaataactcgttcaaatagacgcccagttgtgaaaaactcggatactccagaaaagccgaaggttcaatttttatttgaaatgcatcttccgcttttttgacaagctgaaccagtaagattgaatcaactccgtaatccgcaaaagacgtatcctgatctaaattcccgtaaggtattttcagctccgcggaaaaaatctccattaacttcctgatcatagcttcattgtcaccatgaccagagatcactttttcctcagcatccgggttatttttagccgcttgaattcttgtctgaagcagctgcttcagcttgaatttctccggatgtgtctttgccggtataaggcatggatatccgtttatcgtcatgatttcatccagcatggaaatacctgtttctgttgagtgtgaaagtaaaccgagtgcctgatatgatggacttgtcacctcgcccatcccaatgtccttccagctcggccagttaattgattgataatatgttttgccggctgcatgctgatacgccgcaaagtaatccataaaagcgttagccgcggcatagtcacttgttccggcgcctaataaaggaaaagcgctcgcaacagatgaaaacaaaatgaagaaatcaagttcgtcatcaataaaaacgtcatgaagtacttgcatcccctgcacctttggctcaaatacttctcttatttcttgatcagatttatgaataaaagccggattcgaatgattggctgcaccagcgcaatgaatcaccccgccgattttgccgaacttcattcgcacctctgaaaagaagcgatgtaatttttctttttccgtgagcggcccggaatacacttccacctgaactcccttttgatccaactcatgcagcagttgtaatttcgaataaagaggtgacttttcatcggtgtcttctaacatgccggctattttatcagattccggaaggtcggttactcccatcagcacaagttttttgactcccttgccggcataatgtctggcaagttctgctccgatccctcttgttccccctgtaataaccaaggtttgatccgtacggcataccggcagaccggataggttccggtttatttccgccgcatttaatttctcgacgtatggaatataacgatcaccgttccggtagcagatttcactatacagcccgtcagcgcaagcttcatctgtgattacctgtctcagttccgccgcagtcccgacatgcccgtctacatctattgtttttgattttatcttttgatactccgcgctcagcattttatatagtccggctgtttcggctccggctaacgacggcttgtcattcagaagtgtctgcagccctcttgtcacatgtaaaacgaaaagctttttacgtgtctttatgatttcctgcagcagtgtcagcttcccgattgtgccggtgcgtgccccgttttgattactccgcaaatctgacaggtcaatcatgccgatgatttccggattttcttctatgactgctagagccgtttttttggcttccccatccgaatgatcccagttatctgcgcaaatgacagcgggttcaatcagaggatctgaatcaaacaattcgaatgcaagccgctcactttcactattagccaggatcatcacctgtcctttcgtaaaagcggaaggcgcagccttttgttttttccacgatttttttaatacatcaaatgataagtcagtcggtgcatggggcagactctgcggtacacctgttttctgtttctgtgctgcttttgcggcaggcacccaatatctgttccgttcaaaagggtatgcaggaagagaaataagcttcggtaattccgcagtgtacatctcttcccattcaacgtctcctccgttcacccagtgaatggccatatctcttgcattttcaaagtgagcggctgacagggcattcttttgaccggcgcctcggcgggcgtttcccctatataaaccgtttaacttatgatctgaccgcaaatacatcgtcagcttatcgcgaagatcgtcaaggctgctaacctcaacagcgagccgctcttccatagcgtttctcccggtctgcgaagtgtacgcggcatcagctagtgacgtttttggctccagttcttttatatatgcatcaatcaagagtctgagccgttcttcatttttggcagaaagcagaataatttgcgtcttgttgctctgtaccgtttccatcttttcttcattcttgtactcttcgatgataatgtgggcattagatcctccagcgccgaaagaactgatacccgaccttctggcttgattttgcggcgtctcccaatcggtcaattcagactgcacgtaaaacggtgtttcctcaaaatcaatattaggatttaagttatcggaatgaagggaaggagcaagctgtttatacttcatttgcatcagcacttttgtgatagaagcaattcccgccgcggcctctaggtgtccgatatttgacttaaccgaaccaattgcacaacgataatcgcttttcgagctgtgcaaagctttggttaaacctgaaatttcaatcgggtctcccaaagatgtccctgtgccatgcgcttcaatataacttatgctgtctgcatcaatccccgccttatcaagagtttcactgatgacgtttgcctgctcgcccggatttggcacagtgtatccatttgtttttccgccgtgatttacagatgttcccttaatcacaccgtaaatcctgtccccgtcagcctttgcggcagaaagcgatttcaaaagaacggccccgactccttctcccggcacatatccgtctcctcccgctccaaagcttctgcagcgcccatcgcttgaaacaaaatgattttgtgaaagtaaagtatatttatccgggtgtaaggataaattcactcctccggctatggcgagggtggattctcccctttttaaactttcacatgcaaaatgaacagcagaaagtgaagaagaacacattgtatcaattgcaaggctgggtccgtgcaggtcaaagaaatatgacacccggtttgcgatagacgaataagaagacaagagcgcctgacgtccctcatcatctgaagcaccggctgcaaataactgatagtggctgtaggtgacgccgacaaatacccctgtcttatgccgtttcaactttttctttgtgtaacccgcatcttcaaacgtgtgccatgctgtctctaaaaataaccgttcctgaggatcaattaactcggcatcacgaggcgaaattgagaagaacagcggatcgaatttatcagcgtcttttataaaacctccccatttgctatcatgacgggcattgtcacctgtgtgataatatttccgaaaatcccagcgctctttcggtatttccgttatacaatcttttccggaagaaatattttcccaaaactgttccacatccttcgccatcgggtagcggccggctataccgataattgcaatatcttcctcggaaggtgcggatggtatgcgggaaacggaaagcttctcccgtttcgccggcgccgaatgatcaattcgctgttcggctgccggtaaaaacgccttcttcaactcatgttgatagtgttcaagaaaatactctgacagctcttcaacactgctgtattcaaagaaaagagtcttagacactcttccaaaatacttttcgagacgggagttaagacctaaaattgttagagaatcaattccgtaacggtcaaatgtatcctcgggtaaaatgctgtccgccggtcttcccgtttccgcaccgacgatctctgtcaatagacggatcgtttgctttttcagatctttttcatttaattgcggcagactgttgttttcaggcacagtctctatctttttatggtcagttgagagtaattcacttattctatctttgtctccgctgataacagccagctgagaagcagaacggctcatactgtcctgaaaagcggcaagccctgcttgggcagataaaagttccagccccgtgtgtcttaaagcctgcagctctgccggaccaactgtcatattccccgcatcccataaaggccaattaatagaaagtgttttcccgggacgtcccttaatgcttcgatactgggtgaatccgtccatacatccgttagcgaaggcgtagtcgctctgacccgcattaggcagaacggccgaaagggatgaaaacataacgaagaaatcaagaggctcttcttcagctgctttatccagccaaacggttccgaatactttaggcgctataacttcttctatgctttctttcgctttttttatgataaatgcatccttaacaagtccggcactgtgcaaaattccgtttaattctccgaatgtctgcttaatgtgcttaattaacgcgtccgcctctttttcctttgaaatatctgccgggacatataaggcttcagcaccgagattttcaagcgcgctcaatttttgcgccgtttcacgggatgccggagaacgcccggttaataccagcttgacttccgcctgtttcgccagatattccgcaaacagatacccgaggcctccggctcctcccgtaattaaatacacaccgttcttttttacactgaaactatgtttctccccatcttctttttttactcttttaagctgccttttataataatgcctcggctcataacaggtaaagtggtccgtcttgcattgattgttccattcaaaagagatgacatctgcaatatgctgctttgtaaacggctcgtcaaacattgatttcagctctgcagccttacatgtgaaattcggattttcggcctgtacggtcttaagaaaactttcaaccgcgttataaatgggctgaacctcgccctcggcattttcatacagaaacaaaacttctgctttcggacaaagtttgttcgccatgaaggcctgaaacatttgaaacaaggaaaacagacttttattgagctgctttcttattgcatcttctgtatttttgaagagcccggcagctaaaaaatgaataatatggcggggtcttatattttgagaacgcagaaccccgcatagcgcatcataatcctcatcatttgcaaagttcattttaaaacgaccgttccggcaatcttcgaaacgctcgccggaagtcacgtaaatgaaaggcgcctcatagccttcaagctgtctcttcattacggtatacatgctgtcgtctttgcaaaaaaataaaattggctctttcgtattcgggaatttttcactgcctttaaattcatgtctatcccataccatttcatatagatgggttttccccaaactcttaattaattccagcccttcttcacgcgtcaggctgccttctttcacctttttcacgatttgctcaatttgcatcgttttttcattcatggaaaagcaactcctctatcagctctgacgtctctttcgtattcatctcacctgtttgtgctttttcaagaagcgacatgatttctccatctgctgtatctttatttgaattgtgaagctcagtgttcgagaaagcctcaatcttctgcgcttcatctttatttaaatgaatccaatgtctgttcttactgaaaggataaagaggaagaggccgtttaaccggtttgagttcctcctcatacaagtcttcccagctgatttcacaaccgatcgtccacaactgagccagtttggccggcttgttttgctgaatcagtgattgaacatatgcatgaccttcggggccgccgaataaaggagcgtacagactatcaaaatccgttacatttccttcataaacaccttgcagtctgctcccctgaatgtaaccgtttaatttttcaagaagatctccggtattcgagcaagtgatcgcaaggcggcattcaaatggttcccttccggtttgcagcgtatatgctatttcttcaagaccgattccggacttttctctaaaattgccgttatacggtttatcagctgatcgattccagacgctgctgatatagcggcacagctcactcagggtcattaattcctgaaatatatctagtgatatttctgtgccgtacatttggtttatataagagattaattcggaataagccaacggatcaaatccgaattccgaaagaggtgtctttgcatctatatttgcggtatctaaacgcaggatacccgctgccgcttcccgaaccgcctcttgcacatcacgttcctgcacctcttgctgactgaattgaactgatagttcttcatgtaaaaacgctgttaactctttggctttaaccatcagcctttcctttgttttggccgatagaacaatgatttgatcccgctcggcagttactgctttatcttgtccgtattcaaattcttccacgatgacatgagcatttgccccgccgaatccaaaggaactgactccggcgcggcgcggaatttcatttccttttcgatcttttaatctggcccacttcatagttttattgacaatatgaaacggtgttccgcttaattgaatgtaagggttcagctccttaacatgaagtgtggcaggcaatgttttatacttcatggatagtaatactttaatcagccccggcattccagaggcgggctctaaatgaccgatattcgtttttactgaaccgatgccgcaatattggtcatgattctttcctggatgcggctcaaaagatccaaacgcttttttcaagccttcaatctcaatcggatctcccagttctgttccggttccgtgtgcttcaatataagatatcgtatcaacaggaatatcggcatttttgtaaacagacgttattagttctgcctgagcttccgggttcggagcggtcaatgaagcagatcttcctccgtgattttctccggttcctctcaggactccgtaaatattgtctctgtcattcattgccgcttgcaatggtttcaataacagaacagctgcaccttcaccgcggacataaccgtcggcaagtttatcaaacgtcttacaccggccgtccctagacaaaataccgagtttatcggtatacatatgcgtgactggatctaagagcagcgaaaccccgcctgctaccgccagctcactttcgccattttgaatcgagcgcacagctctgtggattgctacaagactgcttgagcaggctgtatcaatggactcactcggacctctgaaattaaaatagtgggatacacgattgctgatgagcgcctggctgtttccggttcccgcaaacgcatgcgccccgtccgaatgcctcatcagcagctggcggtaatcattaaattgaatgcccgtaaacaccccgatatgtttgccggacagctttgaagctttgtaacccgcatcttctatcgctttccaggtttcctgcaaataaattctgtgctgaggatccatgagttctgcttcccgcggattaatattgaaaaacgcctcatcaaatttatcggcatctgtgataaatccgccccatttcgaatgtacttcgctgcttcctttgccttcggcgtattttttccaatcccatcgatccgggggaatttcctgaatcgaatctttttcattgattaaattgatccaaaactcatctgcattttttgctcccggaaaaacacaactcatcccgataatggcaaccggctgcttctccggatgatggtcagcctgtcttgctgtctttttttcaaacggaaaacttcgcggcggcttcacggttttccctgcggttttcccggcgtgcactttccttttttcagaaatatttttttctgcacctgtattcccttttgcaacagtacgcagttcactgtttaggaattctgaaagagactttatatggctgtaagtaaagaaaacggcaggtgtcagcttaagcttgtattttttattcagtctgacagctaatgttttcaaactgatagaatcaaagccgagattgccgaaattctctgccgtatccagctgttcaatgttaattttcaataattccgacaccatttgtttcagttcttcaaggacattgtctgcagaacccggtcctctataagaactttcctcttgacgaaccggaagcgtatttactttttgatgcggcagatctttttttgctggtgttgttccggcatccccggtaacaaccgaaatttgcggacagtcacttgccaaaattgtctcaaaagccgctatcccttcttccgtttccaaataatcaaacccggatgcggaaagatatgcgtcttcagcttctttgtttaaatgcattccgcctttacgccacaacggccagttaatcgaaatgctcttgccttgtctctcttgcctgcggctctgttcggatctccaatttatatattgatcttgaaaataattgcccaacgcatagttaacctgtccaaaatctccgaagaccgaagaaatagaagaaaatacgataaagaaatcaagcggctcatctttcgttaattcatctaagcataccgttccttcaattttagcagtcatgccttccgtaaaatcagtcagattcatctctgtaaataaccgatcatcggcatgaccagctgaatgaataacgccttgaatggatccccaagtccgtttcgtttcttctatgacccatcccatcgtcttttgatctgcggcatcagcttgataatataccgcgtctcctccaagcgcctgcagccggtcaatgttatgtcgtttatcagctgttaacggtgatcttcccgtcaatactaattttgcttgatactgagaggctaaatattttgcaaaaatcaggcccagaccgcccaaaccgcccgttatgaggtaaatccctttctgtttcagctgatgagagtgctctgtatgattgaatacatactcctttaatgtcttaacatacctcttgtcatttatatatttaacttcttccgcctgccgttccacgcctgaaaccatttcgttaagacaaaattcagccattttttcaattgatatacgttctgaaaaaccgattgacttcacattctctgcggatggcaccaacatatttgccgtttttaaacagcctgcaagagcgcccgtatacggatcattcatgccttttttaaaagagtgaacaagaagcagagaatgaagataaagagaggcgtcactgcgggcgctcagggcttttaataaataaaaaattgattccaggccgctgagaaggcggtcacccgcgtaaaatgtttctcccgtgtgcaagatgacatcaggagaaaacccttttttctccaattcttcgaataaacgaatataatctgacgtcacttccgggtttatacagaatgtcagcagattttgatcggtctgccgctgatccggcgtgacgagaatgacacggctgtctgattgatttttcagagcttcagccaacgcttcatcttttgcaaagaccagaattgtttttggctccctatctttcatttcaatcagagggtttttttgatcccactcatgctcataaaaacgtacatttttattaggcttttcgccaaaaaccagcccgctcagttccatcaaaatcccgccggcattgtctaatacatacacatcataagccgaatcgctttcttcagtttgttctgcatatacataaacgggttcagtctcatgatcaaaaatcgtacattctttaatattttccggggtctctccggcattttcccccgcaaggtatacgacggcttgatatgcgctctcaatcacttccggtttgattatgcaccctttcggcccggcctttgcttttatctttaaaagcacctgtccgttcctgctgacgcagtgctctgcggctttcagactgtcactgcagctgtatccgaattcggcaagccgctgataaaacgcttcgtacggtatacggtctgcgccctgagacaggaacggctcaagatgaatatttccgttctcgtacgccccgccttctaattcgagccgccctgaggaataaatggataagtcgctctgtttttctatagaatacgatgcaccctgattatccggggttaatacaatccggatctgctcattgcttccgctttgtaacatcggttctctaaaggagagctcagttaatttaataatcggattccctgaagccatcgctccggcagctctcgccatttcaatctggctgagaaacggaaacatttccttgtcttgatactttgtttttatatacaaaccggtatcgcttacattgataagaaacttctgggctttaaaatcagatatattgcatgaaatgtaaggatgcagatcgttatttacgttcatccggcggcttcccgtattttgcgcatctattctgcatagctctttggcaaatggatatcccggtgctgatacccgtctcaaagtgacatctttataaagtgacagccaatctactccattaccgccaacccagtattcagcaatcttcacaagatccctgtttgcggctgattcttcaatttcagctttgttcgtcctttgagcttctgttgtgtctttgccgcttgtaaaaatatgatccctcgcatttccgagagtatagtctgtcagccctttaagcaattcatctcttgtggaggcgataacagccaatctgtgcggcatttcttctctcccggtttgtaaagtaaatgctgtatttctaagtgtttctaatgaataatctctggctgctatttgttcttttgcgcgttttgcatattctgccagcctgtcggcattttttgcagaaaaaacaaataaaagctgttcaggttcttcagccgcgagaggagagatagcttcatccgcaaattcttctaaaataacatgggcattagctcctcctgccccgaaagaactgattccggcacgcctgggaacggatgactcccatttttcggctctgtccggtacataaaaaggtgttttttgaaacggtatattctcattcaattcagcagaatgagtcagtgacggaacaatcgttttatgtttcatttgaagaataactttcgtaatgcccgctatgcctgcagcagcctcaagatgtccgatatttgatttaaccgacccgatcgcgcatgtcttcttatcgcgttcggcacctgaaaatgctttggtcaggccggtgatttcaatcggatctcctaacgcggtgcctgttccgtgagcttctatatagctgatgcttttgggatcaatacatcctttttttaaggctctcgtaatgacctcactttgagcttttggattcggcacggtatatccattcgtcttagcaccgtggttgatcgctgttgccttaataactgaataaatctgatcaccgtcggcaatagccttttttacgggtttcagcagcacggcacctgtcccttctcccggcacatagccgtctcctcctgaaccgaagcttctgcaccggccatcactggataaaaatcctccttgagtcaggagttcatatttatgaggatgaatggataaattgacgcctcctgcaattgcaatttcacattcattcctgattaaactttcacaggcaaaatgaacagccgttaatgatgaggaacacatcgtgtccaaagcaatacttggcccgctgaaattaaagaagtaggatacccggtttgcgattgatgcaaatgaggaagaaacggccgcttcgtgaccaacgctgtacagctgatattggccgtacataacccctgcaaaaacaccgacgttttttctttcaagcgttttctttgcgtacccggcatcttctatggtgtgccaaaccgtctctaaaaacagtctctcctgcggatcaattaattcagcttcggcaggagaaatattaaagaacaacggatcaaaatgatacacatcgtcaataaatcccccccatttgctttggttttttacttcgtcgcccgccgcaggctgatagtgcagcctcgaatcccaccgatcctcaggtatctcagttatacagtctttaccgttcaataagttttcccacagagtatcaagatcatttgccatcgggtaacgtccgctgataccgataatagcgatatcattgtcatgatacttctcctgctgcacctgatttttcatctggattttctgtttcccgttaacatcggctgtctgtttattatcttttttcttctgagatggagtgccgctcccgttttctcctaaccggagtttatgaagaagagtatccctgtgctcctcaacgaaatactgtgacaattctgccgcagtctgatattcgaataacagcgtttttgagagcgcgccgaaatgtttttcaagctcattcgtcatattgataatcataacggaatcaagtccgtatttttccaatgcctcttctgcatctattttgtccgcaggcatcctgaattctgcagcaattatttttatgataaaatcagatgtttcagctgtcagtttctctgaatcaaatgattcgatatttctccctgttccttcatctgcctgaatattgtcttttcgttcatataattgatgaacatgattgtcaatttgctcatctccgtaaaatacagtgaattgcgaaaaaccggaggacaatgcgacggcaaacgcttttttaccttcttctttttctaaaggataaaaacccgcctttttcattgtctctaccgttcgctcatccacttgcatgccgacttctttccacagcggccagttcagagagagagaaatcgtatcagaatgctgggcagaacgcatattcataaaatgatccatataactgtttccgaacgcgtaatcagattgcccgacatttcccaacactgcggaagtagaggagaagcaaatgaaaaagtcaggattttctttctcaacagcatcattcagccacatcgtacccaatactttcggtctgattacctgatcgaattcctctcgtgacttgttaagaaggaaagaatcccggatgattcccgcgccctgaatgaccccgtttacttttccataagaagttttggcttttttgactacatattcggcttcttccttattggtaatatcagcctgaacataaacagctgaagaaccggcatcctccaatcgcctcagctgttttcttatatgatctgaaagcggagatctacctgttaaaacaaggcagcattttgtttgaaaagccaaatattctgcaaaggtaaatcctaatccgcccgcgccgcccgcgataatatatactccattttctctcagcggcacagctccgcttccggaatttttttcgggttcatacgttttgagctgtttgacataacgctgcatgtctttataacggatctctacatctgaaggctggaaatcactcagctcattgcgtatgatatcagctgcgtgaacggctgctattgactgctccatttcaatgctttttgctgagattaacggattttccagctgtaatgtccgcaaaaatccgcttgccgccgcgtaaagaggctgttctccggaaagatgcgaaaaatatccatataacagcttgatcggtttgcggcagttatttttgaagagcgcctgttgtaataaaaacaaagaatagactccgctgtcgcattgttcacgaattgctctctctgttttttcaaacggcatgtctgaccataaatgcaccgcttcccgtatatctgacttctcttcttctataagccatcctaacaggtttatgtaatctttttcagagcgggggtcgatttcaaatacaccgtccccggtttttcgaaactctttccccggcttaaccaaaataacccttgtatcatgcaatgcagcaagttctttactcacatcttcatttttatcaaataataaaaggctgccctcacgccggccgccttttacatgtatgctgagatctgtccgctgccagaccgtctgataatatatcgcctgtccgttaccccctgcggaatgagaaccaagctgctgtatccgctttactccttcttccaaagaaatgatgccgctttctatgtcagaaagtactttttttctaatatgacgggcttctttcataaaaatcttcatcccctttacaaatggcactgccgcaaaatgataaactaatcctgcatatgctccagcgcataatctgcttcttcggcagtcagttcgcccgcttttaattgtctgagaagctcttttactctctcgttctttccattggaatccgctgttgcacgagtctgtgcctccgcggaaaacgtttcttttttacgaatggttacatccttcaaacctgcaagtctttctccttgttcattaagcagctgaatatcgtaaataagctcggattgacctttttggcctgttttacgcgcatatgcccagcattctgctgaaacttttttccgaatcgtaatctctcctattgaaaaaggaacataaacagatgcctcttctcttccgtccgtaatcccgaacaaagattgcagagccccatcaattaaagacggatgcaatgtataattttcaagagcatatgcggcttcttttggcagcaataagtgtgcaaccgcttctgtttttccgccccataaacgttgaatcggctgaaaagcgcgcccatacaggaacccgttttcccgaaaatacttgtaacattcatcttgttcacggacaaaagcacttctgtttatcatctcttgtctgtcgatattctctatatcatcatcaccgtaatgatgatcataatctaattcccccgtcacaaatccagtccttacagcagcatcctcgtcagatgacatattaaataatattttgccgtcttttacggaaatgtgagtgtaaatggtcagactctcttgcaaaagcatggccggtcttgcaaagatcacgttttttaaacgagtgacctctttctttcgatatgaccgcgttcccgctgcgcatgccatttcaagaaaagcagctgccgggagaatgctcttgttttttacgatgtggtcttttaaccaaatctctttttctcttaatgtcgttttaaaaaactgctgttccagagtagattcattcgaatccagaagcgggtgcagtgaagactgctgcggcaatatttccggaaatattgcgctttgatttcgaggcacccagtaagactcctcagcaaatggatataaaggaagcttgaccttttgcggggtatactcttcatataactctctccattgaatatcagccccgaaagaccataattttgctagaagattcaagtcctttgtctccatcatcacttcgaggaatttatctttcatcttttgatcatgaaagataaagactttatcaaaatcttttgtaacattgcctttgtatacgccctctccaattgttccttcagtacagaaagttctcagcttctccttaagttccggcaaatcggaagctacaacagcaagtctgtcttccataggctccctgcatgtctgcaatgtaaaagcgatatcagctgccgaggctgttgtctcccgctctgtgaattgcagaaggcgccgggcgtattctttcagtctgtcttcatttttggcagaaagaactgcggcaaacggaccgcttattgtttgtgtgtccgcatggttttgatattcctccacaatgacatgggcatttgctcctcccgctccgaacgaactgattgctgctctcctgttagaggcgcctgattctttccgccactcttcttctttctgctgaacgtaaaaaggcgtcttttcaaatcggatattttggttcagctgttccgagtgaatggatggcgccaacttctgatgcttaaattgtaaaagaacttttgtaagggctgctatacctgcggcagactccaaatgtccgatattagacttcactgaacctatggcacaaaattgtttatcatccgtaaatttctcaaaagcttttgtcaatcctgcgatctcaatcggatctccgagcgaggtacccgttccgtgtgcttccaagtagctgacggatcgcggactgatgcccgatttcttgaaattttcagcaatcagctcagcttgtgcattcggattcggaaccgtaaatccattggtttttccgccatgatttacagatgttcctttaatcactccgtatatatgatcctgatcagcaattgctttttccagaggtttcaacagaacggctcccgaaccttctcccgggacatagccgtctccgccctctccgaaacttctgcacaatccttcggtggaaacaaaattaccttgactcagccaaaggtatttgctggggtgtatggatacattaacgccgcctgcaagcgcaatttcactttcccctcttttaatgctctcacatgccaagtgaatggccgtcagcgatgatgaacacatcgtatccagtgcaatgctcgggccggagagattaaaaaagtacgaaaccctgttggcaatagatgaaaagaaggaactgagcgcaatcggattgccccgcgcagtttcttctgcgccgaataattgatattgtccgtacatggctccgacaaatacaccggctttcataccgttaagcttctcttttgtatatcctgaatcttcaaacgtatgccaggaggtttcgagaaaaattcgctcctgagggtccatcagctcagcttctttatgagaaatgtggaaaaacagcggatcgaattgatcaacaccgctgataaaaccgccccacttactgttgattttccccttctccattctgtcgggactgtaattcgatctgaaatcccaacgttcctcggggatttcaataatacagtttttccctccggcaatgttttcccagaactcctcaagagtatcggaattcggatatcttccgctcacaccgataatggcaatatcctcccccggctgatccatgctcggtgcaggtgtatccttctgctgccggtgctgttttttactcggattttctcttttcttctgtactcttgttaccggagctgcccctgcggccttaagcactttttctttaaaagatgttaggaagaagtttgaaagctcttcaatgttctgatattcaaaaaagattgttttcggaagatccccgaaagtatcttcaagctttgcaataagtgacatgatcataagtgagttgattccgaacttctcaaaagagtctttcgcatttattttatgagcttggattttcaagacaccgctgatgatcttgattaaatagtcattgactttttctttcgcagcatattccgcttcttcatcgtgttccgccgtgagtgtatcttgatctgctgcagctgtatttctttgaatcgaaagcgcctttatcattttatcccgctcaccttctgcaggcattaagctggtaaatgaagaccgcagcattttcagaaacgcttccagaacagaggaagttcgcatcggagtcattccgtatttttcttttatttgaacgattccactgctgtcgagactcattccgccatctttcaataacggccaattgattgatagtgtttttccgtttcgagagagctgggatcgaagcattgcaaaactgtccataaaatgatttgcgtacgcatagtcactttggccggcatttccgtaagcggaaaaagaagaaaagagaacaaaaaaatcaagatcttcgtcttttgtcagctcatccagccagattgtcccgtaaactttcggtttcagtacgtccgtaaaatcaccgggacttttatttacaagaaatgaatcacgaaggatgccggcagcatggatgatcccgtttatgctgccgtaccgctgtttaatgccgaaaatgaatcgctctgcctctgttcgatctgttatgtccgtccgctgatattcaacaatagagccgctctcattaagcatactgatccgttctttttgatcagctgttaaaaaagaacggcctgtaagtataatcacggcttgattttcattagcgatgtgttccgcaaacagcagcccgagttttccggctcctccggtaatgatatatatgccgcctttttgatacgttacagatccgttatcgtgttccggaatatcaataggctgcagccctttcacataacgggtatatgagtctattaaaatctcacattcatccgtttgaatgcgctgcatttcactgattgcagcatcccacatctcggaaaccggaggatttatgtcagaatcctcgtggcgtatctgtatggttttcgctttaagcttggagctttccatgtttaccgttttcacgaaccctccgacagcttcatgaaacggctgattcagaccgcttgtccaataaatatgcaataacgtaacaggttcgtttcttcgcattaaagcttttgataataaaaagagcgagtttatccctctgcgaagagattcattaacagattcttcagtgaattctctgatttctctattccataaataaagcacgacatcaggtgtaaatccgttttcagccaaatcagacagcagcatttcgacatgatgttcatcagaaggattgattgtgcatctattccgttcaattctgtaatcagaatcgggcgttacaagaatgacacggttatgttctccattcatcatctcggcatgctgaaaaagacggttatcctgatcaaaaatcagcatattccccggtgcctgctgattcggcatatcaatgtgatttgtcctgacccaatcggtcttaaaaaaaatggttggggacggagcttgtgattccggctccgcctttttttccatttgttgttttctgtaagtacgaattagctccagtcctgcatcaggagacatttgctgttcttcaattaaggaaagtatttgtttgatctgcactattttccctccagcagctgataaacttggtcagcagaaagttcaccgtttttcaattgttccaataagaagagaatttcctgatcttcatttttatgacctgcggttaattctcccccggtcacttttctgacagagaagtctttcatgctcacggctacttcgccgctctcgttaataaaatcaatgttatacgtataaaaaccggtttctctcaccgaaacatggcatcgggcagtaagcgccctcttaatgtgaagctctctaagtgaataaggaacaaataagccgtctttctcattttctcttaacaaaaatgcagccgcttgaaaaccgccgtcaattaatgaaggatggagtgtaaaatgtgaaaacccgttcgctaaatgatccggaagctccaattctgccattaactccacatcaccgcgatatacggctttcaacgtttgaaaaccgctctgatatgtcaggcccatacgactgaagcggtgataacactctttccggcttatgaccgttttactgctgcgtatgaactgatcaatatcgacatactcaggattgctgtttatgtctccgaatactgtttcacattgtgtgcagatttgctgcacgccatccgggccctctttacatatcgttgcgttcaacttatcttgtttcatttccaagccggtataaatgtgcagcgtttttcctttatataatataggtctgttccacatcacgtcttttattttatatactttactttctccgcttatttccgcacaaactagagccatttcaagcgaagcggctcccggcaacacacagtctcctgaaacaaggtgatcagtgacgaaaaattcagttccggaaataacagttttaaatgcttgtttctttaatgttgagacattctcgctgattaatgggtgaagacttttgctattaacctcgcctttgttctttttcggagtaaaccaataactctcttttgcaaacggataagacggcagcggcactctattcaatttctcattgccgatggtcttccattcaaactcggctccattggcccaccattgtgcgagcagctcctcctttccgctttgaagagcctcctgaatcatatattcagaaacagctgcacgctcttcagtgttttcgcttataaatacgccattttgcaccttgcttttatcaagaaagctgacgtatttatctctcagctcagtcagactcactgcacatacggcaattctctcgttcattgcttcccggccgttttgcaatgtaaattccatgtcactggcattaacggtcatgtcaccggcaatcacgcgatccaagtactgaaccataagccggatatactcaagtaattgatctttggttttcgcagataaaacaaaaatgtgtgttttaccgttgttttccggtacttctttttgaggttccctatattcctctaaaacaatatgtgcgttcacaccgccgaatccgaatgagctgacacctgctctcctcggcagatcgttgttctcttcatcttttatcggattccacttttgagcggtttctgtgatataaaatggcgtattttccattttgatgtatggattgagttctgaaaaatgggcgagtcccggaagtttgcgatatttaaaagccagtaacactttcagcactccggctattccggcagcggtttcgagatggccgatgtttgttttcacagacccgattccgcagcttttctgtttctcaaaaggaatgtcccattcttgatataacgttttaaatgcctttatgatgctgtttacttcaatcggatcgccaagacttgtccctgtgccatgcgcttctatatatcccgcagtggcgggactgacccccgccttccgccaagcttcggttaataagtccgcctgtgcgttcggattcggagctgtcaaagaattggcgcggccgccgtgatttacagctgaccctttaatcaaaccataaatatgatcaccgtctgcctgtgctttgctgagcggcttaagcagtactgcagccgccccttcactccttacatagccgtcagcgcttttatcaaacgttttgcactttccgtctttggaaagcatacctgctttatcaaaagctataaacagagtagggcttgtcataatatgcactccgcctgcaatcgccatttcaaaatcgcctctttgaatcccctcagccgcacgatggagtgcaactaatgaacttgaacaggcagtgtcaatcggttcgctcggacccgtcaggttcagctggtaagaaatacgattagccaatatacaatgatttaaaccggttgcggtctgcgcctgaacagagacgccattttcattgagacgttccgcatagtccgttgtggcgacccctgcaaacaccgcggttttcgtccctgccagatctgacggcttatagcccgcatcttctattgttttccatacagtctccataaaaattctttgctggggatccattaattctgcttcggcgggagaaatcccgaaaaacaacggatcaaaactgtccgcgcctttgataaatccgcctttttttatttttgttctattgacgtccctgatcggatcgccgtcaaactctttccagtcccaacggtcttcaggaatgtctgtaatcatatcccgccctttttcaattccttcccaaaagtcttccagcgtatctgtttgggggaaacggccgcttattcccactattgcaaccggctcattcatatgtctttcctcttgcctggttttgttttcaggctcaggggaatgttcataggattccggcggaggcgtgctgtacaatgttttttcgtctgctgcagaaaaaggttctgtctcagcaaaaaggatttctccgtattgctcgattacataatcagtcagttcagccagtgaattgcattcaaagaaaatggacggcaataattccgtaccatattgttgattgatttcatttccgagtctggtaaacgtaatagaatcaaatccgtactcgccgaatgaagtctcttcttccatttcctttctgtcaatctttaaaatactggacatcatctttgcgatgccctcaatcagattttctctcctgtctttcgccgcagattcatctgaagaaaaagatccgcagagatgaagctcttcggaatactcactctttaaaaactcaagaagttcattaaaatcagtaagaccgaaaaaatctgacggcatcattgatattcctaatgtttcgtttaattcgttgcccagcattgtaaacataattgaatcaaatccgtattcacttatcggcagttcaaaatcaaattcccgttcttcaatttttaatacgccggtgatgatgcgcgtcaaagtgctttttaaagattcagttattgacagctctttcggttcgtgattttcgtcggcgattgccgggtcactttttccgctgtcaatcgttatcattcgttccagctttaattcattaccgctaaataccattatttgatgttcacaccctgtcattgcttgatcaaatgctgcaaggccttcccgttttcccagaggcagcattccgaaacggtcataaaggaacttctctgaatgaatgtcaatttgcataccgccttctttccataaaggccaattaatcgagactgtttttccaggtttattttccgccgctctcatttccgcaaagtaatccataaaccggtttgcataagcataatcagtttgtccggcattcccgattattgcgctgatagatgaaaacataacaaaaaagtccagaggttctctgtctgtataccggtcaagccatatcgttccgtaaaccttgctggccaggactgaatcgagatcctcttcacgcttattgatgagtaatgaatcttttatcacaccggcgctgtgaataactcctttaacaggacctaatttgtttttgacgagttttatcaggttgttgacattttccttatcagaaatatcggtttttacataaaaaacttctgatccgtttttttcgagctcttttacattgcttacggcttcctcagaaagctctgacctgccgataagcacaagctttattctcccttttcgcacaagatgtctggcaaaaatcaggcccaggccgcctgttcctcctgtaataaggtaaactcccccttcttttacttccatctttttgggggctctgccctttcaatttctgcagagtgtttcacctgcctgattccatctctgtatctgatctctgaagcatcatcgctgatgactgtttctttcacaaggttttttaattcaggcagaccggtgttcagctgtaactgaatttcatcgctgtgtatttcaatatttttaccggacaacattggatgttctaaatgaagcgacctaaaaaagccgctgattgccatttgataaggtaagatttgattgttccttgtgaaaaatacatgtgatatcagaattttatgtcttgggattgttgctaacagagctttcgttacattgaaaaccggcaaaacagcctcttccagcttttcatgaatgttatgctcaattcccgtttcagggctcatcccgattaaaatgacgcggtcaattgtcacttgtctttctttaagaatcgccagcaatttcttatagccttcaagtttgacgctgttcaattcaaaggaatcagcttctttttcttgaaaacttccgccatggcggacaaagatcatgttcaggccgatatctttatatgcctggcggatcagcggttctgatatatcctgacggagtgaaattacaaggcagctgtttaaaccgctgccttcaggctgatgaagcataggggcccgcttccacatatcagagtaatacttagctgaatgccgctcattttgagtctgcggtgcagcccttaatgccttcaacgctaagttttttattttaagacttacagatccgtgttcatccataaatagtatatgaaaccttttgacatcatcatgttgtctttcatcggcagctgtaatgtaagcatagccgcttgccgaaggtggttgaagaatttccagctcacctaattcaaaaggcaaatatgcggtatgatcgtcttcctgaccggacgtaaacccgattgtggattgaaaaatgccatccaataaacacggttccagcagcccgccggattttttatcaatgctctcaggaagtgatattcgtgcaagaacagcattttcatggataagcagctgttttattacctgaaagccggctccatagtccaaaccgctctgccggaagtttctataacactcagcgccgctgattaatcttttctgtccggttaaccagctgtccaatttaaaatgctctgtatgagaggcgtctttatctccgcatgtcataatgtttccttggcaatgaactgccgcttcagattgcatatcggttttcaccacaaatctgccgtctttttgattcggcagcagatctatcattatcgtcttttctttttcaacggttatcggaaccgcccatacaacctgactcagttttatgactgattttccgtacagcctctctcccgcttctctggccgcttcgatgattgccgctccgggcagaaccatattcccatgcacaacatggtcttttaaataatattcagaatctgaaagcgttttataaaatcggcactcaccggcagaaaaatcaaataaaggagctgtaccggctgctgatgttgtttgcgccttatttgacacccacagtctgttttttaagaaagggtaagtcggcagcgcaatttttgccggttttctgccggtgcggaaatcttcccagcttaaactccctcccgatacccagaattcagccatgtcggctaatgtggttctgccggaattgagcggaagatccgattgccgctgtccgcgtttatgattcggttttttccctctgaatatttcgtgatcgtcaattccattataaaagtgatttaatttcaacatcaggtcatcgatatttttcgaaatgacagcaagcctttccggcatggcttcccgcccttcaagaagggtatatgcaatatcagaaaggtgaagcggcttatttgttcccgccggctgtaaacactcgccctgcttatgacgagccttttgaagatattcctccagcttttttgctgattcccgtaaactcagtgaatgcttggctgagagtacgataagttcttcactttcctcacgccccgtttgacagtcagcagcagactcatactcttccacaagaatatgagcatttgccccgcccgctccgaaagaacttaatcccgcacgccgcggatatttgctgtcagaatgtttttcattcgcgggttttatccagtcggcagtttcctgctggagacaaaaaggtgtctcttccagataaagatccggatgcacccgttcagcatgcagtgttgcggctatttttttatacttcatttgtaaaataatctttgtcaggccggcaatacccgcggccgcttcgagatgaccgatgttagatttaatcgatccgagagagcaatatgaaacatcttcggtataagctctgaacgccttggtcagacctcggacttcaatcgggtcacccagcggcgttcccgtgccgtgtgcttcaataaagctgacacttctggcgctccaaccggccgctttaagagctccttgaattaaatccgcctgtgcggcaggattaggcaccgtatagccattcgtctttccgccatggttaattgccgttccttttatgacggcgtacacagtatcattatcacgtatggcatctttaagcggtttaagaataacggccccgacaccttctccgggcacgaaaccgtcgccgccttctccaaaacttctgcattttcccgattttgaaagcattcccatctgacaccggtataaatagtcagaaggatgaagatacaaatttactcctcccgcaaccgcaaccgagcactcacctttttttaaactttggcaagccatgtgaattgccgttaaggatgaagagcaagccgtatctacagggatactgggacccgtaaaatcaaatgtgtaagacactctgttcgcgagagaccacgggaacgaatttggaagtacatcgtttttgtccgtcggtattctttcgccgagcagcttgtaagaattggttgtaactcccgcaaatacaccgacatgtttttcggtctgctttctcaacccttcaatggtatatcccgaatcttcaaatgctttccatacggtttcgagaaatattcgttcctgaggatccatcgcttctgcttctctcggcgatatttggaaaaacaaagaatcaaatgattcagcattctttaaaaatccgccccatttgcaataaattttcccctcatgcgctttagcgggatctggatcatagtaggtctcataattccatcgttctttcggaatttctgtgattgaggttctctcttttgatagaagatcccacaattcttcgatattttcagccccgggataacggccgctgataccgattaccgctatcccgtcaagatgttctttttcctccgccgcagatgcagtggtgttttgttccggcctggcgggggtaatgctctgaatctgttttcctttttcctcccgtgaaaataaacgtcccagccgatccgggtattcttttacaagatgatctgctaaatctctgattgtatgaaattcaaataaaagcgttttcgaaattgctcccagtgactgctccagctttgtgttgcattgatgaatcataacggaatccattccatattcagccagatgcacatcttgatcgatctcttcccgttctgcaccgacctcacaggagatgatattggttaaaaacaaaactgtctgatccaaaatatcgccttgagccaaaggaacggcactgcctgtctctgtttcgtccgtcaaaaatctctgctgcataaattgttcaaagcgttcatgatcaccgcagactgcaatattatgcagctgacccgaagttacaatccgcgaaaaccattgcgttccgtcttcagcaggaagttcttcgagccctgaaccatgaaaaagagacgtccgcccttgacctgacaggttcgcccccattccgatgtcttgccataaaggccaattgattgtcagggtgcggccgctgcgcagagaattttgccgtttctgttcccgatattcggcaaaatgatctaaaaagccgtttgcatatgcataatcacactgaccttcgttgcctgcaatagagacgactgaagaaaaaacggcgaaaaaatctaattcgagcgacttcgttgcatgatcaagattcaatgcgccatgaactttcggagcaatcacctctgaaagttcatgctttgtttttcgaaaaagcagcgagtctctgataactcctgcacaatgaatgacgccatgaagacctgcatgctgatcggtaataccgtcaatcattttttttaccgcttctttatcggatatattcgcctgtatataataaaccttggctttaaagctgttcaggtattctaaatgtttctgcttatctccgtttaaaacagatcgccccgataggataatggtggatctttcagttttcgcgcaatattcagcgattttactgccaatccccccaaatccccctgtaattaaatatactttatctttttcagggtattgaatggtctttctgtttgtttctctctgcttctctaacatccgtgcatatcttacgcagcctctgtaagtgatatgaatatgccgatcaggcgctgtgtttatttctttataaagaatgtcagccttctctgaacatgaaacggatgcagaatcatgttcaaagcaaaccgtcttacaatgcagctgcgggtactcttgttttaccgattttaaaaaaccgttcacaccttcaaaatacggcaatttttctttttgatctgcgctgaatgtataaatgaacgttactttgtttataaggttctcgctgattaaagccttagtcagataaaacacagaataaattcctgatgcgagtgtttcttccagttcaggctgtttttcagaccaagtatgcaaaattgcatcgggcgctgcgcctttttcctttaacagacgaatgacaccttgataatcttcgggacactgcctgttgatggtgaaaacactgtcgcttatctgctctaaacggtcaccgggcataataagatatgcggacgtattctctctttttttcagctcttcaaaatagtctttattcccggagaacaacaaaatagtacaggcttgtccgctgcccgcttcattctcaagtgcggtttctttccataccggcgtataaagtgcctgattcttcttttctgaaaaagccgcgtctgattttaccggctgagggtttaaagaaaattgagagcgctcaaacggataaggcggaagcggggcttttcttttatgataatcacctagtttcgcccattcaatctcttctcctgaaagccacatttgcataaatgaatgataaagagcctcatcagctggtttgtccgcttcaaaagcagccgctttgtttagttttgctgatggagggagcgatccgaattgaaaaactgaaaaatcagagatattcacatccggctccgttcccttttcttccgtgtgaagcggcatatggtcagctatctcctgaaacacggcatccatctgattgtattctgtcatcagcggaaaacgggccttatcataaaaacctgccggctgctcattcatacaagcaacagcctgtttaattccgtcttgctttttcaataacatgctcagaaaaagttctttagacaagattccttcatccagtaaatttaatatttccagaacataatcattatcaaagaatccatcataatctgttaaatcccatctcttatacagtcttctcatagaggcaaggatagccatgatcgccgcttcctcttcagccggcaatgcgtttcttttatccgccgtgcgattcacaatataagataaaatctcgatttcctgagtctttcccgctttatcccactcttctaaaaaccctttaaacgtatattggtgctcaagaagcagccgtgttttcccgtacaggcggtctgtaaaatcagccgggaagctcagaccgttcagcagcatccttacatattcttcatttaatcgaaccggcgggtacgtttttgaagtgtacggattgacaaatggaatggacggcggctcgcaggataagtgcgaaggtttttcagcgcctgtgatgacagaaatggccttttcaattttgatgatatccgctgctgcaagagcgacgtaatatccgtctccggcgcctgtaatgagacttggcttaaaaccggatgccaggatactttttatgatttccgtattgataactaaagaatacaagcggattttctcaggcgtccattttcttttaaatgaactgtgcaatgctggtatacccttcagcaccgaccttacgttcttttctagatcagggaacacgcgtttcaaaacggcaaattgtttataactttcccatttgaagtcaccgatggcaagcgcccattcagaatcatgtttcctccgaaaacttaatccctctttaagctgatttttaaattcctccttgctgcctgccaataaacccgccctgtaatcaaacgatgtccttgttaaaagggtgctgctgatcgcttcatttgatattttgcaaaattcctcagaatcgtcagaaaaggttctccaattatgtatcatttgtttcatgctttcttcacttttagcggaaaaaaggaagggagcccttacctttctgtcagtttcgtcatttgtatgtataaattcttcgatgatgacgtgagagttaacacccccaaaaccgaaggagctgattcccgccctgagcggagccccgtctgccgccttccaatcacttgaatcaagcgccggcctaaacggtgttttttcaaactgtataattggatttaccgtatgtacattcaggcttttcggcaccctccgatgtttcatcatcattagaacttttatcaatccggccattcccgccgctgcttctgtatgaccgatatttgttttcacacttccgattctgcaatattgagtatcctcagtatattgccgatatgcttttgtcaatgcttctatttctatcggatcgcccagagatgtacctgtaccatgtgcttctacataagaaaccgtcgcagcatcaacagcagcgttgtgtaaagcttctgagatgacccggcactgcgcttctgctctgggagcggttatggaacgggatttaccgccatgattaacagccgtcccttttatgatcccgtatatatggtgaccggcttttactgcatcaccaaggcgctgcagcaatacaacgcctgccccttctccgggaacgtacccgttcgccgctgcgtcaaaggttttacatttgccgtcaggactcagcattctggctttagaaaaagaaatatattttccgggttggaaattcaagtttactcccgatgcaattgcataatcgctttcttttgtccgcaatgacttaaccgcttcatgtaaagcaacaagcgacgatgcacaagcggcatttacagacatgctttttccggtcaaaccgaatgtgtatgaaagccggttggagagcatagcttcgaaacttcctaaacaggcgtaactgtcgatttccgattcatgacctgtctgccggtagtcagaattcataatacccgcaaaaacagaagtggttttacgctggagatcccgcaaagagaccccggaatcttcgatgcaccgccaagtttcttctaaaaggattctttgctcaggatccatgtttttcgcttcccggggagagatattaaaaaacttatggtcgaaatggtcagctttatgaataaaacctccccacttgctgattgttttgttcggtatactgatatcagctgagtaataaagatcgggatcccaccgttcaatcggcacttcccggatggaatctttgccgctatttatgttttcccagaattcatgataatgatctgcatcggggaatctgcaagcaaccccgattatcgcgatatccgcactctgtttattcaaatgaaccattggcctccacccgcccctttttagtgtagaaataacgtatccaatctgcgtcttagcagactttcggtctcattcatcattttttcaccaatgtcatcgacatgtctgtttctccatgattccaactccgtgccctttacccaatggttaaaagcgcctaaagacgggccgcaatgaacttggaaattcaccttttgttcttcctccccttccaaagcaagcagacatcctctctgcaaataccacttaaatagtaacagcatcttatatttttgattgcgctccgctttttgggccaggttcggctgtttttctattatgctttcgtagatttcatcaaaagtcttattaaaataaacattttcgagctgaatctttgtctcttcatctatctcactcaaagactcatattgttggtagatttgaaataatttatttgccctgaccggaaacagcgtgccctttttcagcacctgaacctttgttccgaactcaaacagagtctccgaaggcgcataagcagtatcgcatatttctgtctcactcagcatttctttaacaaaaccgcttgttgcggcttcaactgtacattgattaatggatcccgtcataataaaatcagcgcccattaaaaaagcagacgccgcagactcgggagttccgattcctcccgcggccccgactctgatcttccttgcgtatttatgtgtttccatcatttcatcccgcaggttaacaaaaaacggcagcatcgccgtcaatgagccctgttcggtattactgccgcaatctgcttcaataatgatatcgtctgctgacggaacacggctgagccactccgcctgctcttccgtcagcataccgtgctgacacattctctttacgatactttggggaggcggactcagaaatgcggccgcaacttccggccgtgaaactttggcaatgatccgattatgaggtatgaccctgccgcttttgtccatcttcaactgatgcgctttgtaataaattaatggcgcgctgacggaaagatacgaagacgcttctattacccgtacgtcatgcttgatatataaatctatcaattccttttctctatcttgatgatccggctcaaatcgcagattcattccgtagggctggccatttttgagtgtctccttaatagaaataagggcctgttcaatttcccttatagttaaacccgctgtgccaaagaaccccagcattcctttcttcccgaggcggatcagcatttcagcggaagagatccctctatgcatcgcacctgccaaatacgcgtatgtcaaaccgtaatcttctttgaaagattgatcacccaatcgggacaccggtgaagccgcaacgctttctatattttcggccatgaggcccttctctttcccgctttcggaattgtccttgttcccttcagaaaacaagagactgtcttttggcgcactaatattaagcggttcctcatctctttgtatggtttgaattaatttagtcagaatgtttccgggaccgatctcttcaaacacagtgacgccttgtcccattaagtacctgatgctttcagtccatttcaccgagtttgttatttgttcaattaaattccgtttgatatcttcttgtttataaggtcttgccgtatagttagagatgaccgggaaattcaattcagaaaaatgaaactccccgataaattccgcaaattcacgctgtgcactttccatgaaacgagaatgaaaagctccgccgacttgcaatacgatataagctttcgccccttctttttcaaaaaaagaggctgcacgctttatctcttctgcagcccctgctatcacaatttgtgaagatgtattgtaattggcgatatctatttggccgaattcatacttttgaagtatttttttatgtgatgctcatccagtccgatcacggcagccattccgccctcggaagcctcactcattaactcgcctcttttagcaaccagccggagacctgtttcaaaattaaaaacaccggccgcaaaaagcgcagtatattcacccagactatgtcctgcaacagcatcagggcgagtatgaccttcttttaaaccctttaaatattgcagtgcgctcactgtataaattgcaggttgtgtatacttcgtatcagtgagcctctctttttcatctgaaaggcataaatcctttatggagtatcctaaaatatgatctgcctttttaatgagctcactgaattcatcgaataagtctctgcccattcctttaaactgcgctccctgtccgggaaagacgtaagcaagcatttgttttcctccttgttccgtatttctgccgtttcttttcgttccgattgtgatttgtttaacatttttcacttcaatttttaaaattgtcatttactctaagcacccggcaccattacttaataagcattacgaagcaaaataaaaaaacctttatgccggataaaggtttaaaagcaaaaagcatgtacaaagatcatattgccgcaaataatagatagaattttctgataattaaaaccgcattttcattctgttttttatatatcaatataataaaaacatcccaacgtgccgaaacaacgattggttttatgtgaatatttccctaaataaatactataccatgatttacatgttgtcaatgggaaacacacgtatataccaattcttcagccgccatttacaggcggctgaactcggttgttatcagttcatcagcccatgccgatatgccttcactatactattcgcggaataatagttctttctctttgttgtagtctttagtaaattgattgaactcatctgcttgtttatgcactttttcgtaaactgagtttactttgccgatttgctcttccagctgcgataatgtgagctttttatctttaatcagtttataaaggtcctgatcaagtgaaatggctttttcgtactttttgtacaaaagatcataagatgcataccttttttccattaaagcgacagcatgcccggctttttcttttactttcttatcctttatttcttgagaagttttttttgcggattcaaatgctttttttgaatcatcaatactgtctttttctgctttcagatgtttttttcgctgatttgcattgctcagagcctgatcagacagtgtgacgattttcttgtaatcatccatattcagtttaaccgcgctgtcgtaaagcttgtgctcttttttctccaatttttccaatgttttctgctctttttgaaacggtttttccgcttgaacggctttttccatcgagtcatgaagcgattcaaccggatcttttcccccgcagcccgcaagcagcatacttgcggcgccgagcgctccgattcctgctaatacctttttttgaatcatattcacttaaaatcccccaatcttgacaatttccactatagaagcccgaacgctttttgacaatagctgagctgtaattggcatgaccgggtaaaaagatgcttacggtgctgtcaaagaatacttgcgtaaaaaattgagaaaacagggcggatgaccatacatctttttggcttttacatagtttatagtagacgccggccctgctgacaaagggtcagcgtaattaaaagaggaggtttttttatgtacggatatggatttggcggcggatttggcggcggatttggcggcggttgctgcggcggatacggttatggcggttacggttatggctgcggcggcggatatggccgcacattcgcattaatcgtcgtattgtttatcttattaatcatcgtcggtgccgcttatttaggctgcggctgctgaccttatacaccatgaaaatcggccggcctgctatggccggccaattgtttcgttgcgccgcgataaagaaattcgctataatttacatattaagctttaggagtgaagtttcttgattactatggaaaatattgtacgcgacggacatcccgcgctcagagagatcgctgaagaggttcagcttcccgcttccgacgaagaaaaacagcatcttgctgatatgattgagtttgtgaaaaacagccaaaatcctgaattagccgagaaatacaagcttcgtccgggcgtcggtcttgccgctccgcaaacagacgtaaaaaaacggatgatcgccgtccatgcagaagatgcgaaaggcactttatacagctatgctctttttaaccctaaaatcgtcagccactcagtggaaaaaagctacttgacgagcggagaaggctgcctgtcggtagacgaacccattcccggctatgtgccgcgctacgcccgcatccgcgtaaaggcggtgacgcttgaaggagaacagattgacatccgcctcaaaggttttccggccatcgtgtttcagcacgaaatcgatcatctgaacggcgtgatgttttacgatcatatcgataaagaaaatccgttcaaagaacctgaaaacgccattgccattgaccgttaaaaaaaccggcacttcccaaagtgccggttttctttatttcaaaaggcccagttctttgacggcccagctgattccctcttcatccaccggctttgtgacgaaatcggcggcagcttttaattccggaaccgcatttcccatcgccaccccggtgccggcaaaacggatcatctcaaggtcatttagtccgtcgccgaatgcataagtgtcacttacgccgtacggaagccgctcaagcactcttttaatgccttccgcttttgaaccgcctttcggaagcacatccgttgacaattcatgccagcggacgtaatcaaactccggaaaagcggcatatgctttttcttcatgtccgcggcagaataaaagcagctgataaatttcttttcctttataaaatgtttcatcaacttcgggataaggcgctttcagactgccgataccttccgagacgtgcggatgtccggggacggtcgttttcatcgtgtcttccgccataaatacgacggggtgctccccttctgccgcctgctttaataaacgcgcaaccgcatcttcaggaagcggatttttataaatgacctcaccttcaaatacgacatactggccgttgtatgaaataaatgattcaatctcaagctcttccagaatcggttttaccataaacggggaccttccgctggcgataaaaacgtgatgtccagcctctttaagcgccgtcacggcgtttcttgcgctatcgggaatatgtttatcatggtcatagatcgtgccgtcaatatcaaaaaagatcagttttggtttcatgtcaatttctcctttttcccgtttatcagtcgtgtctttttcaatatcatcatacagaaagtttttcttccggaaaaccgccttgatgaaattccagttttacccacgaaaacaaattcattttttccgcatactactgctataaagggctttaaaggaggtatacgatgctgcgccgattacggaagaaactcagaagacagtggggcggaatgctccggaaaaaagtcatcgcatagaagggatctttcggtttttgaaagtcccttttttgctcgagactttccttataatccgttttcgaatataatagaatcagcgagtctaacatacggcatttaaggagagatttggatgatttataaggtattttatcaagagaaggctgacgaagtacctgttcgggaaaaaacagattcactttacattgagggcgtttcagaacgggacgtcagaacgaaactgaaagatcagaaatacaacattgaatttgttcagcctgtggacggtgcttttttagaatatgagaagcagagcgaaaattttaaagtattggagttatgagcggaatgaaatttgtaaaaaatgaccagactgccgttttcgccctcggcggattgggcgagatcgggaaaaatacgtacggggtgcagtttcaggatgaaattgtactgattgatgcgggaatcaagttcccggaagatgaacttctcggcattgattacgtaatccccgattacacgtatttagtaaaaaatgaagataaaattaaaggtctgtttatcacccacggtcatgaagaccatatcggcggtattccgtacctgctcagacaagtaaatattcccgtttacggcggtaaactcgcgatcggcttacttcggaataaacttgaagagcacgggctgttaagacagaccaaattaaacatcatcggtgaagacgacatcgtgaagttccgcaagacgtctgtatccttcttcagaacgacacacagcattccggattcatacggaatcgtcgtcaaaacaccgccgggcaatatcgtacataccggggactttaagttcgatttcacaccggtaggcgaaccggccaacttgacaaagatggctgaaatcgggaaagaaggcgttttgtgcctgctttctgacagtacaaacagtgaggtgcctgatttcaccatgtcagaacgccgcgtaggcgaaagcattcacgatattttccgaaaagtggacggcagaattatatttgcgacattcgcttcgaatatacaccgtcttcagcaggtgattgaagcagccgttttaaacggcagaaaagttgccgtattcggacgcagtatggaatcggctattgaaatcggacaaaatctcggttacattacctgtcctaaaaatacgtttattgagcataacgaaatcaatcgtatgcctgccaataaggtaacgattttatgtacggggagccaaggtgaaccgatggcggcgttatcacgcatcgctaacgggacgcaccggcagatttccattaatcccggagatacggtcgtcttttcttcctctccgatacccggaaacacaatcagcgtaagccgcaccatcaaccagctgtaccgtgcgggcgcagaagtcattcacggttcattgaatgacattcatacatccggacacggcggacaggaagagcagaaattaatgctccgcctgatcaaaccgaagttctttatgccgattcacggtgagtacagaatgcagaaaatgcacgtcaaactcgcgactgattgcggcatacctgaagaaaactgttttatcatggataatggcgaagtgctggccctcaaaggcgaagaagccgctgtggcaggcaaaattccgtcaggctccgtttacattgacggaagcggaatcggtgatatcggcaatatcgtgctccgcgaccgtcgcattctttcagaagaaggccttgttatcgttgttgtcagcatcaatatggacgactttaaggtttcggcgggacctgatttaatctcaagaggttttgtatatatgagagaatccggtgatttgatcaatgacgcgcagcagctcatttcaaaccatctggagaaagtaatggatcggaaaacaacgcagtggtccgaaattaaaaacgaaattaccgatacgcttgctccgttcctatacgaaaaaacaaaacgccgcccgatgatccttccgatcattatggaggtctaaaaaaactgcactcattacgagtgcagtttttttattgcagcggaatatgctgaaaggctttgacatcaaacagaccggccgccgtcattttaatatccggaatcaccggaagggctaaaaacgataaggtgagaaacggattgaaatcaccggtgaatccaagcagaggaagcttttcatgaagcacgcccaagctgtcattaacccattccgccgacttatcagacaaaagcccggcgatcggaagcggaacggagtgaagcaattctccgtttttcacggctgttaatccgcccccggtgtcacggagcttgttgattgcttttgccaaatcggcatcgtttgtaccgacggcgatgatattatgggaatcgtgagaaatggttgtggcgatggcgccttcttttaacccgaacccttgtacaatcccgagtcctatcattttttcgccgctgtgccgctctgcgacggcgatttttaataaatcattatctgtatcaggtcgaaacgcgtcagcagacggtgcaggcacttctttttttctcgtctccaaatgattcggtatcatttcgattacattcattttcctgccctcttgaatcggtatatgaaaatccgattcagtcagcggcgctttcagccgcactgtatccaacagtgcctggtccggcgaataggaaccggcagactgttcataaaccgtccgtccgttctcggcaacggtccggccggcgaccatggtcttcgtgacggcagcctcccgtacatctgaaatgaacagcagatctgcgtcaaaacccggcgctaccgccccttttgtttcaaggccgtagcactcagccgcatttaagctggcgagctgatacgcaaggaatggatcaagtcccgcctttatcgccattttgacttggtggttcacacttccttctgtaagcagatcatctacatgcttatcatccgtacaaaagaaaaagcggcgcgcgtttttttcattcaccgccggcagcacgttgagcgtattttttgccaccgatccttcgcgcagcatgacgtacattccccgtctgattctgtccagcgcttcttcttttgtcgtcacttcatgatcatttgacaccattgcggttctgtatatattgatgatatctgaagacagtccggctaaatgcccgtcgatccgctttccgtgacgcttggcatcaagcagtttctgaagcatatcctcttcaccttccgcaacagacacataatccattacttccgcaagcccgagcacctctttctcctgataaaaaggctttaaatcctcggcttttaatacagctcctgagcgttcaaagctagcggcgggaacacaggaaggaagcatgaaacggatgttcagcggcgcctttttcgcctgctctatcataaatgaaatgccttttgctccggaaacgttcgcaatttcgtgaggatcagtaatgacagtagtcactccgtgagggaggacggctttagcaaattcaatcggagtaaccatagaggactcgatatgaacatgtccgtcaataaagcccggaacgatcatttggccttctgcatcaatgacttcttccccttcatattcgcccagcccgacgatcactccgcccgtaatggcgatatctgcagaaatccattcctggttaaatacatccatgatttttccgtttttaatgacggtatcggctttttgtctgccggctgatgcattcagccgttcagccagtgtttctttgttcaaaatgcggcctcctctttttctttatatggtacaatatgctatcggatcgcctgatcatagtcaataaaaattgcagaatataccgcttacatgataaatgtctttctattctgacataataaaagaccgtccttttacggacggcttttcactttgtatgaagcactcttttttcaaatcgggaaatgtccgtaagagagccgataacgatgagaatatcttctttttggatcatttcagtcgccagcggagatacgatcacttctttttctctcttgatggccacgatattaatgccgtacttcgcccggatgtccagatcaagcagtgtgttgcccgcaagcctgctgttggccacgatctccacaatgctgtgttcgtcggacagctccaaataatcaagcacattatttgatacgatgttgtgggcgatgcgttttgccatgtcacgttcagggtggacgatgtgatcggccccgattttcgcaagtactttctcatgataatcgttctgcgctttaaccgtgatcgtgttcacgccgagttcctttaagatcagcgtcgttaaaatgctcgcctgtatattttcgccgattgccacaatgacgtggtcaaagttgcgcagccccaagtttttcagcaccgattcatcggttgaatcgccgatgaccgcgtgtgatgcgattttggcgtattcatttactttatcttcatcaatatccatcgccatgacctcaaggccttcttcacttaatgctttgcaaatacttccgccgaagcgtccgagaccgataacggcaaactcttttctcataacagtactcctttaaacaatatctctaataggaatagtatcacattttcggcaatgagttcatatagcgtttaagcttttctgaaaaggcgggtgataaatacaggtccgctccgcgttcgatttcttcctgatagtgacccggaggcgcaatttcctccgctttatcaagaaccagaaacgtcaggacgcctctgtatacacggccgccggcacacacttctatgaacgcgggacggtatgtgtgattatcaacaccttctcttttgtacagataggttgccgcttcaaacgggagcttgtacagcacgccttcagttcgtcccccgtcttcaacaagatcggctctggaaccgtcaggacgccttaacgtgaatctcgtcgaatacccttcaacaaccgcccctccgaccggctcggcaaagaagtggtcgacccccgcctgtttaaaccgggcattgtccatacaggagccgtaagcgaaataataaaccggactgtcatcctcccgtttcataaaacggtattctttccagtctccgcttttgatacggctgaatgaggcacactggccgggctttacgacatatgcgaaggcggttttattcccggcatccgtcgtcacggcaacctctttccggtcaaaatcagcataatacatatccagcttacggatcatctgatgatctgtttcatacaattccccgtacacaaaagctgtttctgctaaagacgccgcaggctgacctttatccgtttcgtacagcacaccgtttatcgcggcctgctcgcacacacatagagcgcctttcagcagttcatggttttcttcacgcttccgtaacaaaccgtatacaaaaagaagcaagttatttttcctccttttggacagcagccgcttctaacggcagaatcacctgaaacgtactgccttctccatttttgctcttaatgttaagtttaccattatgctccttcagaattcgtaaacaaatcggaagcccgagacccgttccctgatcttttgtggagaaaaacggtttcccgatattttcaagcttttctttcgacatgccgtttccttcatcctgtatgctgatcaccgcgtattcttcatcccgttctgtataaatatgaatattcccgccgtcaggcatcgcttcaatcgcatttttaataatattgataaatacctgtttcagctggttttcgtcaccgttgaccatacaggactcagtctgcctgaaatccttctcaatcacagtgttcgacagcaccgcgttcgtgtcaagaagcgtcgccacctgccttaaaatatggttgagatgatgagcggtaaacgtcacggtctgcggcttggcgagcagaagcagctcccccagcacgagatcaatccttttaatctccgaaaaaataatatcgaaataatccgttctttccggatactgggctttcatcagctggagaaagccgctgactgacgttaaaggatttcttacttcatgggcgattcctgccgcaagctccccggcaatggccagcttttgagattgcatggcaaggcgttcgttcgtttccagaagctcgtcgaccgcttttttccgttcactgatatcagacatcgtccccaggctcccgacaaatttctgtctgcggtcataatacagcttataatggacttctccccaaaagatcgtgccgtctcttttaatatatttggccgtaaacattcctgacggggactgctgcttgatttgggagataatataatcaatgatatgtttttcttttataaaataatcattatacatcgtgcccatacattcgctgatggagtggcccgtaatcgtcgtccaggcctgattcaaatatgtaatattcccttgtgaatccgtctgaaaaacgatttcctgcagattgtccatgatccggtttttctcatctgaaagcgcctttgctttctgctcgctgtccttcagctccgccagcagctgctttttattgtccacataataagccagcagccagacgctgattaatgtgacggcggtaaaggtgatgtcaacgggccagttaatcggattccgttcaatcatataaaataaataatcccaaaacataataaaaatcattgccaagattaaggaaatgatacgcgcttgatattttcccatagtcccacctgccgctaacatttctacatatattgtaacattgttgactgcattattgactaaaaaatgataactattcccaattaattgagcaggttcgcttacttttcccgtgagtttttgcacaagttcataataaaaggacggaatgatgccccgccctttttgctgattatgatctatcttttaacgcttcttcgatttcctcaagcagcattttcgctccttcaggacttaaaataattttgccgttgccgtactcctgattttcggaggtaatttccccggtcatcaagcaaatgccgtgcggcttgtatttttttaagacaattttgtctccgtcaacgaaaaattcaatactatctttaatagcgatatccaatgctcttcgcaattcaatcggcatgacaatacgcccgagttcgtctacttttcttactacaccaattgatttcatagaaatcccctacttcctttaatgtctcttctttatgtccaaggaaaatccttcataaacgtagacgaaaggaacggagcaaaagtttctcagcatccggaaatgaatgttttttacaaaagaaagccttttgaaatacgggatacagactttccctccttttttacaaaaacatttcattcccggcggaaacccccaaaaatcgtggtttttctcagaaactttaaatgtagaatcaattaaatcaggatagggattgggtgaaaacatgtttcaatcaactgagatcggaatcgacttaggaaccgctaatatacttgtttacagtaaaaataaaggaattattttaaatgagccttccgttgtcgctgtagatacaacaacgaaagcggtgcttgccatcggaacggatgccaaaagcatgatcggaaagacgccggggaaaatcgtcgccgtacggccgatgaaagacggtgtcattgctgattatgatatgacaactgacttattaaaacacattatgaaaaaagccggaaaaaaaatcggaatgaccttccgcaaaccgaatgtcgtcgtctgcacgccttcaggctcaacggccgttgaacgccgcgccatcagtgacgctgtcaaaaactgcggagcgaaaaacgttcacttgattgaagaacccgtagccgctgcaatcggggccgacctccctgttgacgagccggtcgcaaacgtcgtcgtagatatcggcggcggtacgactgaagtcgccatcatctcattcgggggcgtcgtatcctgccactcgatcagaatcggcggcgaccagcttgatgaagatatcgcctcgttcgtcagaaaaaaatacaacctgctgatcggggaacgcacggcagaacaagtgaaaatggaaatcggatttgcattgatcgaacatgtgccggaaacgatggaaatccgcgggcgtgacctcgtaaccggtctgccgaagacaatcagactgcagtctaatgaaattcagcacgcgatgcgtgagtcgctcctgcatattcttgaagcgatcagagcgacgcttgaagattgtccgccggagctcagcggtgatatcgttgaccgcggcgtcgtgttaaccggcggaggctcccttttaaacgggatgaaagaatggctgacagatgaaatcgtcgttcccgttcatttggcggcaaatccgcttgaatcagtggctatcggcactggacgttcattagacgtcatcgacaagctgcaaaaagcgattaaataataagattgtgcttcttttttctccggccggctcatattgtgagaactggagaaacattaaggaggaagcatatgcttagagatgtgggaagacgcgtagcagtagccgtcattttaagcggaattattttgggggtatgagcatttcactggccaatatgccccattctccggccggcggcgccgtaaaactgaatcatccgtaaagacgcagcaaaagctgtgtctttttcgtttgtgctccttcctttcctttatgaggcgatatttgatatgatgagaaaaaccgatgaggaggaatgaacgatgagttcgtttactgaaaagttaaatacatatgctcagctggcggtagaagtcggcgtcaatgtccaaaaaggacagcatgtcgtaatcaatgcctcaactgatgtccgggaacttgtcagactgcttgccaaacattcttatgaaaaaggcgcaaaaaacgtcaccgtaaattggcaggacgatgaactgtccagattaaaatacgagatggcaccttttgaagcgtttgaagagtatcctgaatgggaagcaaaaggaaaagaagagctcgcgaaaaaaggggctgcgtttatttctgtcgtctcatccgaccccgacctgttaaaaggcgctgacggcaaacggattgcagcgttccaaaaagccgccggaaaagcattgcatacatacagacaatatattcaatcagataaggtcagctggacggtgatcggagcggcttcaacaggctgggcgaaaaaagtgttcccggatcagccggaagaaacagccgttcagcttttatgggaagaaattttcaaaacaacccgcgtaaatgaagaaaaccctgtggcagcatggaaaaaacacgatcaaaatcttcatgaaaaagtggaacacctgaacaaaaaacattacagcgccctgcattatcaggctgaaggaacagacttaaccattgaactgccgaaaaaacatgtatgggcaggcgcgggaagcgtgaatgaaagcgggcacgaattcatggccaacatgccgacagaagaggttttcacccttccgcagcgtgacggggtgaacggcacggtttccagcacgaaaccgcttagctacggcggcaacattattgataacttcactcttacctttgaaaacgggcgcattgtcgatgtgaaagctgaaaaaggcgaggagattttaaaaggcatcgtcgaaaccgatgaaggctcacactatctcggtgaagtggccttagtgccgtacgattcaccgatttcacaatcaaatattttattttacaacacactgtacgatgaaaacgcctctaaccacttggcgatcggcagtgcgtatgcctttaatattgagggcggcaaacaaatgacacgggaagagcttgtcaaagagggcttaaatgaaagcattacacacgtagattttatggtcggttccaaagaaatgaatatcgacggcattaccgcggacggcaaaagagaaccgatcttcagaaacggaaactgggcattttaataaaaaaaaggaggcgatcaggcctcctttttatttcgcttcatacatttgcaagttggcgaagacggtttccaaaacaggtgtatcaattgacaagcctttcgctttctcaagcaaaaagccgtgtaaatgatcaccttccgtcaccctgcccttttccatatctctcagcatcgacgatttcatatggtaagacatgcttgtcaatgtgcgataactctcttcttccagaccaggatctttcgggatgccggcagccttgaaaatggctccgatttcagcaaagaggcgctttgccgtgctgcggccgccttctgtttctaaaatcggtccgaccggctgttgaaacagagtggtcactcccgcctgcgcggcaataaacatatattttttccaaatgtccttttcaatatccccgctgatgatgacatccgctttcacgcctgcaaatgcgttttccagctcattcatacgttctgtgcgctccccgttccattcaccgaaaacaaaacggtgggcagcgctcgtatgaagaatttcccctttgtcgttaagggcgctctcaataaagcagaggccgcccagcacctgccgttttgaaaaagcttcaaacagctggttatagtgcctgtatccgtttaaaaaaggaataatgaccgacgaaggcttgacaaacggtttgacatcccgaatgacgtcctgcaaagaatacgcttttgaagcgatgataacggcgtcaaatgctccttcttcgcccgccaacattaatttcggcttgattgaaacatcaccttttgcacttttgacggtcaaacccgtttcttgtaattgttccgcccgtttcttgcggacgagaaatgtaacgtcatttcccttttctgcaagacgcgcgccgatatatccgcccactcccccagctccgacaactaaaaacttcatgatgcattcctccgtctcttttcaatttatgtattcctttattgtaatgggaagtcagaagattgaaaacttttttcataaataaaaaagcagagtctcccctgcttctttattacgcgtatagctcttcaagctttttctgcacatccgcgttttcaagaaattcgtcataagacatttgtttgtcaacaatgcctttaggcgttaattcaatgatgcgattggcaattgtctgtacaaactgatggtcatgagatgaaaacagcatagcgcctttaaagctgattaagccgttgttaagcgctgtaatggattccaaatctaagtggtttgtcggttcatccagaattaagatattcgcgccggaaagcatcgcttttgaaagcatgcagcgtactttttctcctccggaaaggacgtttgattttttgttgacttcttctcctgagaacagcatgcgtcctaagaaaccgcgcagaaagctttcgctttggtcatgcggcgagtattggcggagccagtcgacaaggttcgcatcgctgccgtcaaaatattcgctgttgtctttagggaagtacgcctgagaagtggtcacgccccatttaaatgtgccgctgtctgcttccatttccccggaaatgattttaaacaatgtcgtaacggcaagttcgttgcggcccgtaaatgcgattttgtcttctctgttcataataaagctgacgttatcaagcaccttaaccccgtcaatcgtttttgttaagccttcaacccgcagcacgtcatttccgatctcgcgttccggcgtgaaattgacataaggataacggcgtgatgacggtttgatatcatcaagcgtgattttatcaaggagtttctttcttgatgtcgcctgctttgatttagaggcgttggcgctgaatctggccacgaactcctgaagctgtttaatctgctcttcttttttcttgttggcttcctgagaaagctttaaagcaagctggcttgattcataccagaaatcatagttgccgacgtacacttgaattttattaaaatcaagatcggcgatgtgcgtgcacactttatttaaaaagtgacggtcatgggatacgacgataactgtgttctcaaagttgattaaaaactcttccagccactgaatcgctttcagatccaagtggttggtcggttcatcaagcagcagaacgtccggcttgccgaacagcgcctgtgccaaaagcactttcaccttttctgaaccgcctaagtcggccattttcttcgtatgcaggtcttcagagatgcccagcccctttaacaaaatagcggcttcactttcagcttcccatccgtttaattccgcaaactctccttcaagctcagcggcgcggatgccgtcttcatctgaaaaatcaggcttcatataaatcgcgtctttttcctgcatgacttcgtataaacgtttatgtcccataatgacgactttcagcacttcgcagtcttcatattcaaagtggttctgcttcagaatggcaagacgttcgcccggactcatatggacatcgccggtctgaggctccagctcaccggataaaattttcaaaaatgttgattttccggcaccgtttgcgcctattaatccgtagcagttgcccggcgtaaatttaatattgacatcttcaaataacttgcgatccgcaaaacgcaagctcacattatttacagcaatcatttagaatcctccatcgtgtctatcatcattaaaagtataccatgaataaaggggaagagaaatgtttccctgcgaatatacgggtttgaaaagatgcaggcgtcaaacccggagcgctgtgatacaatagatatatatacatattcatcacggaggaacaagttgaagcttttaacactcacagaatactgtcttatgattttcttcaccggggtttttctggccgtcacaggctttacggcacgtgacatcggcttgtacgtcggaatcgccctcatttatacgttttcgcatctcttttccaaacggatgcttgaaagacgcggcaaagagaagaagcaggtgaatcttttttcagcgttctggccattgtcggatcagtgctggccacggtattgttcatcgccgtcgcggcctcgtttgccaaataaaaacgcctgctgtccgaatcgggcagcgcggcgtttttattttgtctgacgcatatcatgaaacgggaagaacacaaacttcgaggtgccgacgatccggttttcggcaattaagccgaggccgttccggctgtccattgagttcagccgattgtcgcccatgacaaagtatttgcctttcggaacctttacggggccgaaatctcccgtcaggttgactcccagttttttcgcttcttttttattgctcgcgaggtacggttctgcgatttttttgccgtttatgtaaagcgtgtcatttttcatttccaccgtttctcccggttttccgatgagccgctttacataatggactttcgatgtatcgccgttaataatgacgatgtccccccgctcgatttctccgatataattgacgcttttgttgacaaacagtctttcaccgtcatgtaatgtcgggtacattgatgatccttccactaagtacggttcaaacaggaaatggcggattaacagcgcaagtgcaaccgctataatgatggcctttccccattcccaatacgtgttggattttctttttaccgatttttcagaagtaggtttttgttcttcagtcaacgtggttcctcctagacgatcactgtttcggttcatgtaccatctttactttatcacaactcatcacaaaatacataacgcttctatgcgtatatgattgaaaaaagcgcccgtaaaggacgcttttcgcttatttctctactaccggttttttgatgattcccaagataaccgccgttacaatcgctccgatcacgatgctcattaagtaaagcagcggatggttcgtaatgaatgcaacgaatatccctccgtgcggtgcaggaagcgttacccggaaaaactctgtcagtccgcccgctaccgcagaaccgacaacggctgcagggatgacgcgaagcggatcagccgctgcaaacgggatggcgccttctgtaacgaaagctgctcccatgaagtagcacgtaataccggcttcacggtcacgtttagagaatttgtgtttaaagaatgttgtcgccagtgcgattccaagcggcggagccattccgcccgccatgatggccgcatgcggcgcatagtttccggcatcgatcatcgcgataccgaaagtgaacgccgctttattgagcgggccgcccatgtcgatagccatcataccgcctaaaataatacccattaagacaaggtttccagttccaaggctttcaagccaatttgttaagaaattcataaacgctgctacaggtgtgttaatgacaaactgcatcaggacaccggtgataaaaataccgagcagcggataaatcaatacaggttttaatccgtcaagagtctgaggaataaagacaaacagctttttcaaaaggactacgacataaccggctaagaatcccgcaatcagtccgcccaagaatccggcattcgcctgcgtagccataaatccgccgaccatacccggcgcaaatcccggacggtccgcaatactcattgcgatgaatccggcaagtactgcaacaatcagctttaacgcattaccgtcaccgataaagttcagcgctgcagcaaacgtgttgtatgtcgggtctttcggatcagctgaatgaattccccagaagaatgaaatcgcaacgagaattccgccgccgacgacaaatggcagcatgttgctgacaccgctcattaagtgtttatagaaagtacttccgatgcttgtgcctgatttctgtttcggaccgtcttcatttgaagcggaagatcctccgccgctgccctcgtaaatcggcgcatcttggttaacggctttttcaatcagttcctgtggacgtctgataccggccgtcacaggcacttgaagaacatgtttgcctttaaagcgctccatttcaacctgtttatcagccgccacgataatcgcaggcgcgtcttcaatttcttgagccgtcagcttatgtttaataccgcttgagccgtttgtctcgactttaatgtcaacgccgagctctttcgctttttctttcagtgcgtcagctgccatgaacgtatgagcgatacctgtcgggcatgccgtaaccgcaaggattttcccttttcctgacggcgctgcctgttcttcctgctcttcttcttcctcatcgtcatctttgtcatgctgattgatgatgtcaatgatcgcatcttctgattcagcttcaagaagctgtttgcggatttcctcacgcataagaagcgttgaaagtcttgataatgcctcaaggtgcgtattgttcgctccttcggttgccgcaatcataaagaccaagtgtgccggctgaccgtctaatgattcataatccacaccatcttttgaacggccgaatgcaatggccgggttaatgacgctcgccgtcttcgcgtgaggaatggcaataccttcgccgattcccgtcgagctttggctttcacgatttaaaatggctgctttgtaagcctctctgtcatttaatctgccggctttgtcaagcactgtcaccatttcatcgataacgttttctttctctttgctttctatattgagatgaattgtatctcttgttaacagctcagttatcttcacttttctttcctcctctatagacgtgtgactttaacttcaggaagaagctgctgtacaaactcttcagttccgagttcttcagaaaatgccgtcgcgcttccggaagcaactcctaaacggaacgcatcttccaaaggcagctgttttgaaattcccgcaaggaatcccgcgacgacggaatcacctgcgcctaccgaattgacaagctttcctttaggaacattggcgaggaaaaccgcctctttcgtaaataaaagcgcaccgtcgccagccatcgaaacaatcgcgtgttcagcgccttgttcaattaattttttaccgtaaggaacggcagcttcggctgaatcaatgaccgtattgaacatttccccaagctcatgatgattcggcttcatcaaaaacggtttcatttctgtcgctttcatcagcgcttcaccggagatgtccaccactacccgggcattctgctttctgcatgcctcagcaattttttcatacgtgttatgcggcagggaagaagggatgcttcccgctaaaacgacgatgtctccctcttccagagcggagaactgttctaaaaaggcattgaacacttcgtctgaaatcgtcgggccctgtccgttaatttccgtttcatcgcccgttttcagttttacatttatacgcgtgtcttcatccacctcagaaaaagccgtttccagaccttcctgctgcaaaaatgacgtgatataatttccggtaaatccgccgacaaaccccaatgcttttgacggcacatggtgtcttttcagtaatctcgaaacgttgatgccttttccgccgggatacttcgtgtcatagctggaacggtttaaaccgcctacggcaaaatcttcaacgtgaacgatatagtcaacagacggattgagagttacagtgtaaatcatggtttcactacctttacgacagttttttcttggtaatcatcgaatgcaagttcttcagcttcagtggtaatgatagctgcatcgcccaaggcggcgaacgctgcgaaagaaatctcgccgaatttagaaggatcggctaaaacatacgcatttttcgcctgtctcacagcctttgtcttcagaagagcctcatccggatcgggtgttgtaaagccggcttcaatgtgcacgccgttcaccccgagaaagcttttgtcaaaacggtactggctgaccgccgttaatgaggcgccgccgatcatcgcacctgttctatgcttcacatatcctccgagaagataaaaaggaatccccttccttattaaagcatcgatatgcataaccccgtttgtgacaaccacaatgtcctttgtatgatctataaaatcaatcatgtgcaatgtagttgttcccgcatcaaggtaaatacagtcaccttcttctaataaagatgccgcttcttcagcgatcttcagtttatcctgaaggtttttggaggatttttcaagcatatcgggttcttgcctgctgttggaaagtttagacgccccgccgtgaacgcgctttaaaaatccgcgctcttcaagtgttgataaatctcttctgatcgttgattcagaagcgtttgtcatgcttatcagctcttgaatcttcaccacatctcgcttttcaatctgatccataatcagctgatacctttcaggagtgagcatattccgcctcctttgaaaacgtattcatttcggctgcaagataattgtaaacgctttttttacttcaagcaactaaaatcactcaaattcattcaataactatcaaaatctttcacatttgttcatattaacgtatgtacatagggtttgtaaactgtaaattcgacaaaaagggggacaattgtatgacattttctttttatcataaatgaaaaaagtctattatattcattcaatcattaaaacacaaaaaaccccatgcagactgcatggggcgccggttattcataccgtaacgcttcaatcggatctaagcgtgatgctttgttggcgggcagcatgccgaagatgacgccaatcagcatactgaacagcacgccgatacaaaccacctgccaggaaacgagcgacggccagcctgcgataagggaaacgagtgttgctcccccgtagccgagaccgattccgattaagccgccgattaaagtaagcacaacagattcaattaagaattgtgtcagaatctgtcctctcgtggcaccgagcgatttgcggatgccgatttctcttgtccgttccgtcactgatacgagcataatattcatgaccccgatcccgccgacaacgagagaaataccggcgatcgaaccgatgatcgtcgtcataacggtcgtgacctgaccgattcccgccgcgatttcttccatattcatgacttgataggcctcttttgtaccgtgattgtcatttaagagacgggccgcttcttttcctgttgttttgatttgatcagcggactccgtctgaacggaaacgttgctgtagtcgttagtaccgaaagacgttttcagcatgttgaacggcacatacatttcactgagtcctaacgataaaaagccgctctcttctttcagtacgccgattacttctacgggctgtccgccggcccagacgattttcccgagcggagacgttttcccgaacagcttttcagccatttttttcgagatgattcccgctcttttcccggaaagaaaatcattgtccgtaaacgtccgtccatcttgaacgtccagcttttttacgtccaagtagccgctgttaatgccgttcagcgtaatatccgtgtcttcttcatggtaacgggccgtcatggattttaccgcggaagcgacaacctgctttacgccgtccactccttttaatccattaatatcttcttctgtaaaactcgcttgctgtaaggcgttcggattggctgttaattcttcatcactgggcatgtaaaacaattcaatcgtattgcccggcccgctgatggattgcttcagcatttgctctccgccctggccgacagccacaacaacgattactgaaccgacgccgataatgattccgagcattgtcagaatcgatctcagcttgtgagctcttacggaactgagggccatccggagattttctgacaggctcattcccccactctcctctgctcagaatcgcgggaaacgatcatgccgtcacggacgaaaatcactctgtttgtacagtccgccacttcaggctcatgagtgacaagaaccacggtcacgccctctgcattaagctctgtgaactgctccataatggaaatgcttgttttcgtatccagcgcgccggtcggttcatcagctaaaatgagcttcggttcgttcacgatggctcttgcaatcgcgacacgctgcttctggccgccggacagctcattcggcatgtgacgcatccgatccgccaaaccgactttttccagcgcgtgctcagcccgttcctcacgctcttttttgccgataccggcgtagatcatgggaagttcgacattttttcttgcattcaatcgcggcagcagctgaaactgctgaaagacaaaaccgattgatttgttccggaccgccgcaagctctttttcggtgcatgaagaaacatcttcgcccgcaagactgtaattgccggacgtcggtctgtccagacagccgatgatattcatgatcgtagattttcccgatcccgagggtcccataattgacacatattctccttcttcaatcgtcaggtcgattgaacggagaacatcaaacgtctccttgccgatctgatagctttttttcacctttgaaagctgaatcatctatgctttcacatccgttccgtcagtcaaaccgtcagccggattcagaatgactttatcatcctttgaaagcccctcttttatctccgtaagctgatttgcggtatcgccgactttaactttcacgcgtttggccttcccgtcttttaccgtaaagacccagtgctcatctccgtcttttttgactgcggaggacggcagcgtgtcggctttccgtttgtcggtttcaatgttcataattaatttaaatcccggcttgccttccggaaggtttccgatcagcttaacctgaaacggatactggacggcttgttccgtgctttcccccgaagcagcgcttgacttttgatccggaacgaggccgacagccgccactctccctttccacgttttaccggggatggcgtctgaggtgattgtaacgctttggccctttttcactttcagcgtgtcgtattcggacaaattgccggcaacgaccaggtgttccgggtctcctatatgtataaccggttcttgaatatccgattttttagaagccgcttcttgatttaccgagataaccgtcccgtccatctcactcttaacattgagattcgacacttgattttcaagagactgcttttgcaaatcagattgctttaattcgatttccgccgttttttgctgaagctgcagatcagtccgttcggattcaatttgttttttggcttccgcttctcccacttgttttgccagatcttgttccttgctgtttaatgctctgagtttttcttcaacttgttcgatttgcatccgttttgattgttctgtcaactcattttgttctttatcaaggttgagctgctcatttgtatacgtgactaacgacgaccctttttttactttgtcgccttcttttactttcactttatcaagagttcctttatctgcttcataaaaaacatactgttctttagaaaatttaagtgttcccggaaccataaccgtagatgagatttctctgttttccatggttccggtttcgattttttttccggcgctgccgcccgcgggagcggcagacttataaatattgataccgataaatactgcaacaattacggcgatgccgattccgatccaaatttttttcatgttatacacctgctgtcactgaacttaacagtcctccgactgccgaaaccaaaagcataataacaaacaggacaatcgcggaagtccaggccgcttttttcgaaatgccgcctgtatagcgaagtcccaaagccagcagaatatagctccagatgctgaaaatgtcgaacgcgcttaaaaagaccgcgacgccgtctccggccggtatgacactcgccaaagatgtaacggcgtacaatgagcccgcaccggtaaaataagtgacaagaccgttaataactaagccgatattggtaataaacgccgtaaacaggctgagtgagagcatttttttgtaagttgtcacgccgcctgacattttgacgcacagccagtaaatgagcggaacgataaacagagcgataatgcccccgaagattcctccgaacatcgtgccgaatttagcgaaggttttggtcatttcaatctgatcatccgtcaaaccgtcaagagatgagctgttcagcacttcttcataattcatccccagtccgcgcaaaatactgccggccgcgatgagaatgatgacaatcaggagaggtatgccgatgaccggcttttcttttaatcttttaaactgcacaacaggacttgtaatgacgccgaaaattgacggcttttccgtgactgccgcattgcttttttccaggtttggttccatatagctgatgcctcctatgtattattctgtttatacgtacgctttaggctgagagaagtttcaatttttttgccgtttgcgtatttatgctaaattgtaacacaaattctcagctttacgttccataattatgtaaaaaaaagcatcgtcagaccggtatgacgggtaactcaaaaccttgtaaaggcactgttatcagcctattcatgcagtgaaaaccgcctcaattgcaaaaccctttaaatcccatttagatattctctgaaattcagcgcctataaacaaaaaagccggatggcaatgatgcacatccggctcttttttcaccctccgcttacaggagggataaaggcaatggtatcaccttctgttacggtgctgttgtcttttacatatgtttcattgattgcgatcatggcattgtcaatcgtctgaaggccgtaccgttcctttaacagcgtttttacagcagacgctgccgtctctttttcgtcaagttcaatgaccggtgttcccgcctgctccgcaagcccggcaaataataatactttaatcatcgcgattcccctttatccaaatccggttttccgttcggatagggcgttgtttccagctgatcgcctatccattcttccccgtcttcccagatttcttttttccatatcggcacaatctgttttatccgttcaattgcatattcattcgcctcatatgccgcctttctgtgcggagaagacacagcgattacgaccgctgcttcaccgatatcaaggacgccgacacggtgagtgattgcagcttcggctccttcccatttcgcgctgatttcactgccgatttgagaaagcatttgaacagccatcggttcatacgcttcatattcgagacgcaccgtccgccgtcctgcagtccactctctgaccgtgccgataaacgttgtgatggccccggcttcacgcttttcaactttttttacgatattttccgcaatgataggttcccttgtaatttgaaaacgttccatttaagcagtttcccctttcagctgcgaaagcacaaacataatggcagcaggatcgtccgcatggaatacgggcttgcccgcatctgccggcatatgctccgtatttctgctgacaaccgcgatcacgcgctccaaatgcttcagcttttgccaatcttcgctgtttttgatcataatgattttcggatgcggcgcatgtttaaatccctctatgagaagaccgtcaattcccagacattcatacagactgatcaaacccgccagatcccatttttttcgcgccgtaagctgcaggacgccgtccccttctactgccgtaaccgcggctccggcttttgaaaaacgctccgagtcttttccgtcagaaaaaggttccggttctccgccatgtccgtgatgttttaaacatccaatatcgcactctttcggcgcagctttcagcacacgttcaataaacgttgttttaccgctgttttgaaaacctacgatctggacgatcgggaaagaattgaccacggccattcacttccattctcatcacggatgaggagcgcgtgaaccgtccggcccgcttcataccccctcgttcctcccggcagaaggataaacgcgtttgcttcggcaagagatgtgactgagcttgatttgtcgagaccgaccggtgacgccatcatttttccgtccttatgataaacaaatgccctcacaaatctcgtaaacggattcggcttcggaaagtcgtttgttaacacggcttccgcccatccggaatgaggtttttcattcagaagccatgtctgaatcatcggtttgacaaacagggtgaatccgacataacatgcggacggattgcctgaaaggccgaacagcagcatgtcatcggcccgggcgacagttgtcacgctccccgggcgcattgccactttgttaaaaagaacttccgctccgagcttattataaatgtccggaagaaaatcaaaatcgccgactgacacgccgccggtcgtgatcagaaaatcaacttttttcatagcttccttcaccgcagcatagctgtcatcaaaatcatcggaaattttccctaagttcagcggtactgcacccgcttcaatgacctgggcatacaccatggcagcgttgctgttgcggattttccccggctcaagcggatcgctgacatgaagaagctcggttcccgttgcgataatgccgacaaccggctttctgaccacgggaacggaagcatagccgaaggttgctaaaagagcggttacgcccggcgtgattttcgtccctttttttaatagcgagctgccttttttcgcatcttctccttgatatgaaatattatcgcccgcatgaaaagggcgtttcactgacatgtaattcgtgccgttttcagaaaacgtttttgtcagctcaagcatcactacagcatccgcgcctttgggaatctgcgcccccgtcataatgcggaccgcttcataaggcccgagttctttttctgacacggcgccggctccgatatggtcaatgacttcaaaggtgacggcattgtcacgggaagccgtttttgaatcgctcgccctgatggcaaacccgtcatacggagaacggttaaaagccggcacatcatgatccgccttaacatcctccgccaaatagcggtggagactgtcctcaagcgccacccattcggtatcccccttttttttataccggctcacccggcggactgcttcgtccacctgaatcggcgttcttttttcaagcatagcaatacatccccttcctacagtccgatcactctggccagaactgaattcgcttcttttatatcgtttgtaccgtgaatcagagcccgtccgtcctgaaaaataacgattctgaagcgctcgtacgccatgtgcagcaaaaattcatttgcttccactttaccgatctgcttcagacgtttgacaagctcttctttatccagcctctttaaggcttccgatctgatttgaacggtgtctcttccgcacagcacgcttgctttcggcctgttttcaggctgcagatacggatatacgggctccgcgccgcaggaagggcaatgatcccgtttgatctgatccacatttatgctcatattggtgttattccacacgtcaaacgtgaaaaagcgccgatttaccgccgcatgatttcctgtcagcaatttcagcgcctcagcctgctgataggcggagacgatatgaaccgccggaggtatgatgcctgctgtatcacatgtcgctccgcccacgggcatttgctcaaacaggcaggataaacacggcgtaacccccggaataatcgtcatgcacattccctgactgctgacacaggcaccgtaaatccaaggtgttttcgttttcagcgccagatcattgatgaccattctcgtttcaaaattatctgtcgcatccacaatgcaatccgcttgttcgatcagcggttcgagcgtttccgccgtaccttccgccgcgtaagcatcgatatgtatattactgtttaccgctaaaagacgcgccttggccgccattgctttcggcaggcgctgtctcgcgtcttcttctgtatacagctgctgtctttgtaaattgctccattccacataatcccggtcaataatcgccatacggcccgctccggctcttgcaaggccctctgccgcggctgttccgagggctccggctccgacaatcaggacactgctgtcagccagcgcctgctgccctttttcccctatcggcttaaatcttgtctgccgtgaatagcgctcttccatctgtgttgtccccttgcatttttatttccatcataccatgtttcttaccgatcagtcctgatttgaagactcgacatgcgccaaaagtctggtgtaatcgtcccgtgtgttgatattagcgaactcctccggcccggcgccgatgtcttcagcctgcacataacagacagacagccgtttcagcgtgtctgtcattttcagtttgttttgtgtcagctgatcaaaaagcacatcctgcacccgtttatggtaaaccgccaagaggggctgctctctgttttcacaaaccggtatgacagcgtccagatttcccgtcagcttcatttcaagcgcagccatcgtttttcttgtcacgagcggcgtgtcacaggatatgaccgtatatgtttcgccttccgtttgtttcattgccgtatatatgccggcaagcgggcccattccccgaaaccgcggctcatcggcaaaaacatgccgctccctgtttgataagaacttttttatatgctcagggcggctgataattaccgtttctccgccgccgaaggcttttttcgcctgttcataaaacatgccgcccttccactttgcaaaagctttcggttctccgaatcttcgggaagctccccccgctaatattacattcacccgtttcatgtcatcgctctcccattctatataaaagcatagcaaacgcctcagccgaaatacaatattacggtgcttgtctgtttaattaagaggaatagccgttgttcctttcccatattgtagtgttaacatcaagagggagatggttcttatgaaaatatcaggtccgtttttccacgacacttctcaagagaacctttacttgaaatccgaactttccagatgcagaaaaataatttcggaatttgaagcaagctacttccatcaaaaaaacaataagcttcaggaggaaaacgccaatattaaagagcggcttcacaagctttctgacgaattggaagccatggcgcaaaaacacaaacagactagtgacacggaacgttctttgcatgaaatcagggccgggctgctcgataaaatcgtcattctgcaagaactgcttcagcaggaaacgtttcggcggaaaaatgagatggaagaaaaacatcggctgcatcttacaaatgtaaaatttgaagaagaaaataaaaacttacatacccgcatccgctcacttgagaccgccgttcaaaccgaacggacttctcacgaagatatgaaacagcgttatcatgccgctgcagacgaaaatacccggctccaaacacaaatgatagaaaaagaataccagctcaaacatattaaaatagaaattaatcatatgagagatcgaatactagaaacaaaagaacggcttgtagaaatagaaaaaacgaaagaaaagttatttcaagaaaccattctttcatataaacggcagcttgacgaaagcgatgcttggattgccggccattttgctgatattgacagccgcacggcggaaccggcggaacaaactctggaaatcccttccgtttccaaagagactgttcaggcagaagacttgcttacagccgttaccgaacaagtcatctcccttcaaaaacaatttgtagaatcagagtcccgcgatcagtcgtttgatgaaaaactggatgcgttgaaagaacgagctgacggcgaaaagcctttccaaaaatatgttgtcaagcttgaaaaaaagcctggaaaagatgcgtcacttccgcagaataaacgggaaaacgcaaaaaaactgcttgagtaacgcaagcagtttttactgttttattcagcagccgtatcatttgccgtttctgctgtttcctgagaaatttctccctcaagaatatattggccgcgatatggttttttcacttccggatacattttaattaagctttgcataaatgttgtcatattaggaatttcaaggccgctttccttttcaatttccttttgcagttcggaacttttgatcgctgcattgtggcgtttcaatgttttaatcgctgcttcgcgcagttttgccgcttttgatcccggtctcgccgtccctcttcttcttcttgtagaaccgtctggaatgccggcgggaagagacgtaatagactgcatctgcggctgggaggattgcggctgtgtctgcggcttttgatagcttctcatttcctgtgctgcaagctctgcaagcaccgggagagagtcactttttttctccggacgaaactctttttttgtatcggacaggctgcccgtattgtctaattctctcagttttgcatatattttatcacgttctatttgatattcacgaatgacttttacctctgcttcgttcaattgttctaaacgtaagcgcagcgcttctctttcattaaacatgtgtaaaaccccctgtcaaaaatttaaacgcttttattaagatattagattacaaaagtaattttatcaactattattttatcattttactattttatttactctatgaaaaattgcttattttctgaaaatggtactttatatacaaaaatcccttatcatataggggattctggacaaagttccaatttattgaaccatttcaaaatataacttgaaattacttgtttaatgaaaattagcgtgatatctacaattttcgactataatatgtaaaagttaatgatatggataaaacaagcggtacagcgtgtttacggctgtttctcttattttttaagccatacatgccatattggaattttttatccaatagccacaaaaaaaccctgttacctaacggcaaagggtttgcagaaccgagacaatagtccggcggagattgtcccgattactcagaagcctgctccgtttctgaaagtacccggctgatgcgtttttcaagcattttcatcccgctctctcccgcttgaaaatggcggagctgtccgcttttatcaaaaacgtaataagccggcacatattcattttcaaatgcgtcagccagcgtatgatcgctgtcaacgtaaatcggctgagagatatcgtgttcagccgctgttttcttgattttctcaagatcaagatcgtcttcggaacggggcatgtggacggccaccacattcagctgatctttatatttatcacgaaacccgttcacctcaggcatcgcttctttacacatgcggcagctggcggaccagaagtgaatcagtgccggctttccgccgaccagctgttccttcgtaacttctctgttaatccatgctttagcgcctgttaattcaggcatttgctgatgtaatttcatcttatttccctccttatgaaaaaagttttttgccggggctttcagtccgcctggcaacgttctcctgttttccctccaaaggaaatgatttggctgaatcaccatgttaaaatgagtgtggcgattccttagttcatatcttcacaaaaatgaagatattgaaaccgggcaatatgaacaaatcataaatgtaataactggtttctatgaaaaggtttatcttatttaaaaaacgggtatatcacttttagctttttcctcaatagacttgaaaggaagacatcactatgattgatttaaaacactttgattgggccgggcttctcacatctgccgggattttcatcataaagctggctctcattattttagcgtattttattttccggacggcaggaaaaaagctgatcaagcatctgtttcagaaattcgagcaacaaaacaacctctccacaggccgcgcttatactttgcgaagcctcgcgcttaatgtgtatggatacatcctgattttcgtttttatcgtaatgattttggatttatttcactacaatccgagcgctctcattgccggcgccggcgtggtcggtctcgccgtcggcttcggggctcaggggcttgtcagtgacatcgtcaccggattttttatccttttggaaaaacagatcgacgtcggtgattatattacggttgccggctacagcggcattgtcgagcaggtcggtctccgtacgacgcaaatccgtagctttgacggcacgcttcactatctccccaaccggggcattacgaatgtgagcaaccattcccgcggaacgatgcaggcgcttgtcgatattaaagtgccgcttgaaaaaaatcttgatgaaaccattcaaatcctgcaaaccgcgtgtgacaaagcagccgctgagctcccgcagattaaggaagggccggacgtcatcggggttcaggatttaagcacgtcagaaatggtgatcagaatcattgccaaaacagaaaatatggagcaatggcgggttgaacgcgtactgcggagagaaatgaaaatcgcgctcgaccgttttaaaaacgccgcttccgccgaatagaaaaaccgaagcgtaagcttcggttttttctttttaatgaaattttttttccacttcgctgcagatttcgtcggcggtcattccggaagccgtaatgacgggagcctgagttgacgtatcggcaatgccttggacattgctgtcaagtccggttacgacacagcagtcacaattcttcgcatcctcaggagtcttcatcatcactacgtcatatcctttttgttttaacgcctgttctacatccgataaagattgttcaattccaatttttttcgtcatattgaacacctccgttatgtagaatgctcaatttttgttagattattcttcttttcggatttaattggcatacttcgaaaaatatccgaccatgacatttaccgcggtttccatcgcatcttcatccgggttcagcttggcgtgatgaagcccgtgggatgaatcggcccccagccagaacataaagccgggatattttttcagcatatatccgaaatcttctccggtcatcgcttctttcgccgttttcacgtcagcaagctgatgatcgctgacaaattgcataaattcttcggtcaggccgcttgtattataaacttgatgataaacggacggatacgtgacttttcctttgcatcggaagccgatttcaattcctttgacaagctcttcaatccgctttttcaccatacgcattgattcctcggaaagcgtccggatggttccctccagatgagcatgctctgcgatgatattttgcgccgtgcccccggtaatcgttccgacagttatcacagcgctgtcaagcggatccgtatttctggatatgaccgtttgcagctgcgtgacaagcgtgctcgcggcaacgaccatgtcatctgctgtatgcggatatgccgcatgtccgcctttcccctcaagatcgatgacgagctcgctcgtattggcaaacagcaatccgcttttggtggaaatggtgccgaccggcagctctggtgctatatgtagggcggtgattaaatccggcgtccattttttcagcacatcgctttcaagcatcggtgccgctccgcccggtccttcttcagccggctggaataaaaagagcagatcatgtttgacggggtgatggacaaaatgatcaataatgccgagcgcgatggtcatgtgcatatcgtgtccgcatgcgtgcataaaaccggggtgctcagatgcaaacggaagccccgtctgctcttcaatcgacagagcgtctatatccgctctgtaggcgagcattttttccggagccgtgcccttgattttgacaaagatgccggttctccaagtttcgatttcaattctttcttccggatattggtttaaaagattcagcaggtactgctgggttttatattcctgaaagccgatctccggaatgcggtgcagatctcttcggatggcaatgagccgctctttttccatatgtattcctccttgagataagaataaggcgtggattttatcatccacgcccattctatcaaaccattccttacagctggcgtaattcctgtttgatttctgttttgccttttgttttttcatcgatatctttgatttttttcgctggtgttcccgctacaacggtatatggctcgacgtcatttacaacaatggctccggcggcgacaaccgcgcctttaccgattgttacgccttcaagcacaaccgcatttgcgccgatcacaacgtcgtcttctacgacaacaggcttagcgctaggcggctcaataacgcccgctaatacagaacccgctccgatgtggcagtttttgccgacagtggcgcgtcctccgagaacaacgttcatatcaatcatcgtaccttcgccgatgactgaaccgatattaatagatgcacccatcatgataacggcattgtcgccgatctcgacttggtcgcggataatagcgcctggctcgattctcgctttcacatcttttaaatcaagcatcgggatcgcagagttgcggcggtcattctcaatgacgtaatcctcaattttgtctttgttttcttcgattgcgcttttaatttcagcccactcgccaaaaacgacgccggattggccattcaggaatgttttagcggaatcgccaaagctgattccttcgagatcgccttttacatacacttttacaggcgttgattttgtactattttgaataaatgaaataatttcatttgcatccatcattttcatatgtattgtcctcctctgattttctacctcattactgtaacaaaggaaggatacaaagacaagaaaaaaaggaacaagcctttattctgccggctggctgcacagcgcggcaaactgtcttccgaattcccggagctcttcttcctcactgccctcagggttgttttcaattttgaccggcggcagcaccacccgtccgccgcgggccgtgattactttttccaattcgtcaaccgctccgcaaaaaaactcataggacgtatctccggaaccgaacaaagcaaatgtttttcccgtaaactccagtttttccatatcttcagcaatatcgagcatttcatcaggaagatccccgtctccccacgtatatgtgcctaataaaatatactcgtaatcattaaaaagtccggcatgaatatccatcgcttcatatctgtctacggatgcttgtgcttcgatcagccctttttcaattaaatccgccatcgcctcggtgtttcctgacattgtagcgtaaacaagcaatacattccccatcttcgtctctcctttatgcataaaaactaatgtgcgagccgaaccgcctcatacggtctgacaaacttactttcgtaaaggcccgcgcaaaaaaaatcttcttcccggttggccacccgccatccgtgaccgcggatcgtatcaaaccactttaattcaccggcagcgagatcagcttgataaatacgcgaaaatccgctttcgtcctgtgacgaagtgacataaataatcccgttatcctcagacacgtcaagaaatgatttttcccgtacattgtccccggctgtaatggcaaactcctcatgcgtccgcacgtttcggacagcaagctccccccgttctccctttgccgcgccctttgctgcaatgagccagtcattctgatacatcatcattgaagccgtcatgcgctgcctttcgcggcttatacgccggatgcggccttccgtcgtcagatcatacgcccaaatgccgccatgattcatatgaatccgggtgccgatataaaccgtctgaccgtgtaaacaaagcgaacggatgacaggcggctcctttaattgtgaaaaaggcttagccacatgccaagtgacgccgaaatcatcagataagtagatgcagtatgtgccgtgcgcacagacaaatccgtcattccgcccggcaacggcccatacggaggcgctggtcggaaatcgggaggccgtccaagtctttccttgatcggccgatctgaggacggcgcctttttctccagccgcgaatatgtagggccctatataagtcagcacatgaatcctgctcttcactcggaatagtcttttccagccttcttccgccgaaaaatgaaaaataccttcgcctttcacagcgacaaaaaatcctgaagatactgatgccatgacagccgtcgcgcctttatgaaacatggcaccggtctccgtggtgagcggcccatgcaagaaaaccgcggacaaattctttgcagcattcttgatcttcagccgtctcgggcgccagctcaattttcagcgtttccggatataaattggctccggcctgttcaaacgcatcgcaaaacagcgtgaccgcttcgcaaaacttcgggtaggcgtgatcgcctgaaccgaaacaggccgttttcagtccgttgagctggctgtgcagaatatcttcgtaaaaatcttccgcttcgtaaggaagatcaccatccccccatgtgtatgtgccgacaaaaacataatcatatgctttgagagaatccgcatctgcttcgtccatatcaagacagtcaaccgctatctgatgcccgctcagtgtttcttttataatgccggcaatatcctctgtattccccgacatgcttgcgtatatcattaatgctttctgcatatgatcacctcgtaattgataatgattttcattaacatacataacactttaaatgataatgattttcattgtcaataaaaaataaaaaaaagacagcatgattgctgtctttctaaaatgggcgttcctgtttcagcatatctttaatgacagaaacaaaagcctgcacctgttttaattcaaatgccggctcataaccgagcagccatgtgtcacggccgatcggatggtcctttgtatcaagcaggggcattttatttactttatcttcctcttctaaggtgactgacggcagaatggcataaccgatcccgtgcagcgccatttgcttgcacgtttcaatctgatcgacaaggatggtctgtttcggcgaggttttgaatttttgatgccaccaatgctgaatttcctgaaaatatgtactgtcacttttgaattgaataaacggccggtcggtatgggcaatatcatcaatacaggaaatttccgtatcgaccaaatataaatgatcggtcattaaataatctttccggcctttccattccggatttccccggataatgccgatatgtacctgatcttcatacagacttttcagcatttcgctgctccagcctgtaatgagagagacctttgcattcggatatcgttccacatatgtttttaacactttcggaagccagtgctgcccgataatggaggcgacggcaagctttaatgtgccgtgaatctcaccctcaagttcatcaatgttttctctgattctttcttgccgatccgtgacgtcatttgcaaattgtatgattttttctcctgccggcgttaccgtaagtcctttttgagacctaagaaagatctttgttccccaggttttttcaatggtctgcaatcgctgggacagagccggctgtgacacgaataaccgttcggcagccttcctcatgtttaattcctcagctaaaactacgagcatatgaagctcttgaagctgcatgtcgtcctccttttcaatgccttttcgtattccttatctaccattctaatcaaataaaggctgccgaggcaagcgccactcgtatgtatgcgttttctttttctggcatgcgaaagaacaaataggctgatcgtgcgagcctacttattcaatgatctgatatgactgctcaactgctttaatacgactcttctcgtgaaaatgccttcaaagacgccttcatcattttcaacgcagacaaagccgttgttaatgaccatgctgaaccctttgataatcggatcattgatgtggagacggggaatgtctttcagcatgacttcctcaaccgtaatttgatccagcttctcaaactcgatccgttcaagtccgaaaatgctgttcataatcatatttgtcccgatcaaaccgtgcagacggtacgaagcgtcaaggacgggaatggcggtatagccggttttcgtcagcactaatagagcatgctcaaggttgtttccgacttgaacgtgcgccactttatccgcctcgatcataaattgtccgactgttgcatcaagaagctgatctgattgtaagctaatcatgtcacttcgacccctttacatttttcatcaaagcatgtattccctatattgcaataatataaacattatcattttttgtcgaaaagtttccgtcaataaaaaagatactctttgcaatcgagtatcaatttataggccgctgattaattttcgttccgaaaacggtcatagagcgttacgagttttttataagtggtcccatcaacgctttttgaccctgcttctatatcgttgatttcgctggtcaaaagctcaatggcatattcttgattgatcaggatattcagcagaagtttctgttcttcttccgtaaatcgttcactgataagactcatacgtaatcaggccccctatttttaactgaatacctctgaaagcaatgtgaaatttgctttcagctctaccgctagaataagtaaacagaaaaaaatcgtcaaccgcataattcgacattttgcggattctgtatgaaatattattttgtgtaacgattggcataactgaatgctgtgcaggaatcgggcttgattttcgcttcaatacccatcgaggtaatgcggccggtcatttcttgtatcaattcttttgtcagccctttttgaccgatatccagatgcacttcaaatgaaagatccgccccttcatccgcaaaaggcaagagcaaatctgtcagttccataagacagccgtcgaggatatgcgcagccatctcctggctgaacgcggtttccagcgagattttttcgcgaaggctatgtatcggtcttgcaaggtcgtgatttttcaaacagccccaagctcccttgcctgtacggtgcaagtgtatagccgtaataaactttgtgaagtcgcggtaaacttgtgaatcagtccctacagacagcacgtatgctgaacgggggtctttattgacaaagcgtttcagccgctccgtcacgtcttgaaaggtcatctgtgcctcagaaagattataaaacagaaaagaatcagccatgtacggacactcctctttccagagtctacaaccaaacgaacaagcacgttcctttgcataatttaataaagctccgcttgcggaagaccggaagcttggtcagcctgaaaaatcaaatcacattactgaaggagctcaaaaatttcaatagaaatcatgtcaatgttatcaaacggatatgtgttaggtttttcacctttttggaaaaccgtcagttcaaacgtttgatttttttcgaaatatttaacactgcaaattttttcgccgttaacttcaaaataacgctgcatcggctcgttagccgcttccgctgtttcttgcagactttgcagccgcgtgatgatacccattaattgtgacattctaaaaaaagactcctttcaaaaaacaacttcaaatcaacaagtatttattataatacaagtcctacagagcatcataccataaagtagaccgggatggcattttcccgctggattttcaaaaagaaataaacgggaaaaccgtgttttcgaatagtttgaagcttttttcggaatgtcatacacctttcaaaaataatttttcgctttttgagccgccattgtcagatgtatgtaaggagaagcccttttatgcgcagacagcataaaaaaacttggcggggtagcgccaagctttttcggatcttgatctgatagaggggttggggaacagagagtaacttctctctataactaaatgataatgattatcactatcattgtcaatcgttttttaaaactttttcacatttataaaaaaagcggcatactgcagccgctttaaagtaacccgtcctgttcatataaataagagtaaggcagatcgataaataaatacatattgtcatccatcgggtatgaaaaggttctgatcatctcacccgtctcaatatcactgtacaggtcactgaaaaagccttttcttgaattccgcatcttcataatgttttctaaaaagtacggacgccagctccagtttttctccacgtattcaggctgataaagccattcgccggactgcttgaacacatttcccgtcagctgatagccttcttcatcacacatataaattctgaaacagcagtcggtcaggttttccgccagttttttaataaactcatcgtccgcctgatgggttttcttcagttcggaaactgcctgattgacccgcttataaaaattctcagagtgttcgtatactgtctccagcttctttttttctctcgtgataaattgctgaaactccgttttcaagcgtgcttttaacaggctccggtctataaaatcgccgctcggcgcctgcagataataaccttgaaaaaatcggcctccgtttctccatgcgtactggagctgaaaatcagcttctatatcttcatacagcagcgcggcgccgatttttctcgccagcaatgaaatgctgtacagcacatgctcatacgaaggtgacggctgagatactttcagcgcctgcaaatctattttcagaaggtccggtgaaaggagcgcgattctgtccaggttgctgctctccttacctatattgtccaccgcgattttaatgccgtatgtacgatagtaggcaagcatatggtacagctgttcaatgtcgccttcgaaattgtgctcggtgatctcaagcacaatacggttcaattcaatgccctgctcttcgtattctttcaaaagctcaagaaagctctcgccgtggtcaagcatcaatacattcgcatcctgattgataaaaatcaacagatcgcgatcagcttctttaaaccgctccagcgcctgcctgatgactctgtcatcgacctcaagcttatattcttccgggatgccggaatctaagaaaaacggcccgaggctctcaatctccgcatctgccaaaatacggccaagcacttcgtagcctacgactctttgttcctcagcgttaaaaatcgcttggtaatacggaataacatcatcaatattcgtcagtatatcaagtgggtccaacatgttatcacctgcttctctatctttgtctgattatacacaattatatcagcaccacaaatgtttagattaggggaaaaaggaggcagtatggcagcagtttaaaataaaaggggaaaactttttaagatcactcttcagaccggttaattaaggacgttattcatttgtttcaccatcacaaataaaaggataaatataagagcatgataaccggcggctgtccaaaaataatggctccaatcagtactgttaaatatccaatcatcatcatgtttcaactgaaagaaagttccttttttatctaaagtgccaaatgtaagagttgttaacccgccagcactcttggaaacgtcaacttcatacattgaaccggcatgatcagtatgatttattggcatatacgtataatcagataaaattgtttccgccagcttggttggcagagacacatatcatacagccgatgtatcgcctccgagcccactcaaatactccctggctttaataaatttcgtttcatcaggaaaatctatatgatatagcttttcaaatctgattatttcatcagatgtaagattggtattttgataatactccggagtaaaagcgcaaatgataaagtaccaaatattaaagatgataacgaaactgcttacaaatagtacaacgaaccattttaataatttcttcacttattcacctcttaatctttaaaaattatatcataattttgaatagaaaaataaaacaagcgaacggtcacctttaacgttcgcttgttttgcaaaatatgtcatgtaaattaaaacgggtaaggattcagccattgccccccgtccattgtgatacaatccccgtttatataggatgcttcatcggatagcaaaaacgctgccaaagcggcgatttcctccggtgtccccagacggccgagcggcacactgttcatagtgcgggacaccgctttttccgattcaaacagcttctccgcaccgcctgtccgttcaatcgggccgggggctatcgcgtttgtgcggatgccgtatttgctcccccattcaacggccagcgttcttgtcagtgacaatacccccgctttggctgcagcggaatgaacgacacccgctcccgctccccatgcgtatgtagcggccatatttaagatgacgcccttctgctcctgctcgatccaatgccttgccgcggcttggctgcagaaaaatgtgccgtttaaaacaatctcaataacagctttccatccattgggcgtcagcttctctgccgggcaaataaaattgccggccgcattgttaatcagcgcatcgagccggccaaagacttttttcgcttctgtaatcatgtctgaagcggcggaatcagaacggacatccatttgaaaacaggcgacctgcccctcaaaggtctcaatttctttttttgtttcctcaagtgcttcatggttcctccctgtcaccatgacgtgccatcctaattcagcctgttttttcgccattgcttttcccatgccgcttgaaccgcctgtaatgattaccgctttcttatccataacaaacccaccccttttattgaatgaataatcattcataattttatcatagatgtctttccgcgtcattacatgctgagaagggatttttcagccaggctgatgatataatagaacaactctgacaaaggttggttttacatatggagaaaatgacgagaagaacatttttaaaaagaggattcggcattttgggtgcaactctcgcaacggcttgcggaggttacggctatgcccggtatattgaaccgcgcatgattgagatcacccgtcatacaatcaccagccgcctgatcccccgcggctttgacaattttaaaatcgttcaattcagcgatacgcatctcagtgatgtgtttacatccggtgacttgaataaagcagcggaaaagatcaatcagctgaaacccgatctgctcatctttacgggagatttaattgataagccgcatttatttaatgatcaccagcaagcactggccgtgctgcaaaatctggaagctcccttcggcaaactttgtgtttacggaaaccatgaccacggaggctacggtacgaacacgtacaaggctctgatggaagcggctgattttcaagtgcttcgaaatggctgccgtcaggtgcagctgacagacggaagccggattgaactcgcgtttttggatgatgtaatgctcggaaaacccgattatgaaggcaccctttcccgcctttccgaagatgcgttttccattttaatcgtccacgagcctgatgccgctctcaagatcggcggatatcccgtaaacctccagctgtcgggacacactcacggcggccaggtccagctcccgtttttcggccctctcattacgcctccatacggaaaaacgtataccgacggcatgtatacgctgcatgacacagccgtttacgtcaatcgcgggctcggtacgacaagactgccgtatcgatttttagccagaccggaaatcacgctgttcacattgaaaaccgtacaaaaataagacttttatcccgatgcacagacatcccctccgtaatatgtatatggaaaagagcaaaaaggagggtgacgaaactgctgacatatcaagtgaaacaaggagaaaccatctcaagcattgcgcaagacttcagaataagcactgctgctctccttcaggcaaatccctcaatccaatcggtcatatacgcgggacagcacattatcataccgaatcttcccgacccatccaccattccctattccattgtcgtgtatatcggagcgaagaaactggagttataccgcctcggcaggctcatccgtacgtaccccatcgcagtcggaaaaatattgacgaccacgccgaccggagaattttacattgtgaaccgccagcccaagcccggcggcccgttcggcgcttattggctcagcctctctaaaattcattacggcattcacggaacaaataacccttcctccatcggcaaagcggtatcaaaaggatgcatccggatgtataatcaggacgtcactgaacttgccgctaccgttcctaatggaacaagggtgaccattataagatagaaagatcttatttgttaatggaacgagctgatgataatatattacagtgggacctttagggtaaggagcgtgtttatggatatatttaaaaatcgcaattttgtccgtctctttttcgcagcactcgcttctcaaatgggaacgactgtaggtaatatggctttcgctttttacttgctggaccatttttcaaaccagccggcatacacaactttggctgagctgatgtattcactgccgacagttttcgtatttctgattgtcggtgtcgcagctgaccggcttgacaggaaaaaggtcgcagagaattgtgattggatcagagccggactgacgatcgtattatttgccgcattatacaccgggagcatccctctcgtgttctgtattttgttcatcagaagcgccgtgaccaagttctttttcccggcggaagccagccttgtacaagctattctgcctaaggagcattatgcgaaagcggcgggacttaaccagatcctgttcagcatctttatggtattcggcgtcggtatgggcgcgtttatgtataaaacgatcggtattcacggagccattatccttgattttgtcagctttattgtatcaggctttctgatccgcgcctgccgcattccgaaagaagcccgtcagccgaacggcccttttaaatggggagattcgtttctgaaagactcggtcgctgattttaaggaagggatcgtatatattgttaaaaacaaattgcttgcttcccttattttcggcttttttatctttggttttgtcaacggcggctttgccgtactgccgatgtttacgatgaaatacggacttgcgcctgatcattacgaatcacatacttccatcttcaccgtcgcactcggcttcggcctgcttgcaggaagtgtgatcggaacaatgatcgcaaaaaaagtcaaaccgcatcatttgatgtcgattcctattttggcagccggactgctcatttttgtcctcggctatacggataagctgtggatttattatgcggcggctttcatcctcggcatgtgcatcggccctgtcaatatcgccatcggcggctggatgccgaaaatcgttcatccgaaaataatgggccgggtcagcggctggcaggatccttttatgatgtttgcccaatcgattacactcggactggttgccctgttatttccgaaattcgtttccaatattgattacctttattacggcatgggaatcgtgattttagcggtatttgtgttctattttatcgctcttccgaaatacagcgccgaggcagcagaggtcgatgtgcagcaatcattaaaggctgattccgaaaaacatgcgaaacctgtctaataaaggaaaaaaatgcgcccttttcatcagaaaaaggcgtatttttataatcaatatttgcatttcaacgctaaaaaagtataatctatatatgaacttgatcaatgcaaaggagagaaataatggacgaccacgcttattcgaaagagctgcagccaaccatcgagaatctttcaaaagctgtttatactgtgaaccgccatgcaaaaaccgcccccaaccctaaatacctttatctgctgaaaaaacgggcattacaaaagcttgtgaaagaaggcaaagggaaaaaaatagggcttcacttttcaaataatcccaggtttagccaacagcagtcagacgtacttatctctatcggagactactattttcacatgcctccaacaaaagaagacttccagcatcttccgcatttaggtacgttaaatcaatcgtaccgcaatcctaaagcacaaatgtctttgacaaaagcgaaaaacgtattgcaaaaatatgtgggcttaaaggaaaaaccgcttgccgccaacaggcagcagcccgcttatcataaacccgtatttaaaaaacttggtgagagttatttttaattccgccgcaaaaaagccgatgcgtcatgcatcggcttttttctattcaatcacgtacgtatccacttttttaatgagctcgctgatttcaggcttgctgatctgttcatccgctccgactacttcgccccggtggcgcaggtcgtccgtaatgagggacgagaaaatcataatcggcacatcagagctttgcgggttatccttaaggagcttcgtcaaacgatgcccgtccattttcggcatctcaatgtcactgataatcatgtcaatatgatctgacaggtttgctccgttatccgtcagttccacgacgtaatcatacgcttcttttccgttttcaaatgtaacgatttcactgtaccccgcctcagtcagctcatccgtcaaaagacgcatcagaagcggcgaatcttcaacgatgatcagttttttacccgcccgtctttcatcaaatccttcctgatggacatgataagtctcaactccggatgccgattcaatatcgtaaatgatcttttcataatcaggcagaaagatcatcgtgtcttccagtttgatgattcccgttaaatgccgctccatgccctggttcagggaagtcggcttttcaatcgcctcccaggacaccctgtggatttgtgaaacggaaccgacgtgaaagacgattttccgcttgttgaattccgttacgatatatttatcgtcttttgctccttcggcatcaacgccgaaaaaggaatacagactgatgacgggaagaatttcgcctctcagcttaatcatcccttctacgtctttatgagactgaggcacagatgtgacatctaccggctgaatgatttcccggactttcatcacatttatgccaaatgtattgacgcctacttcaaatttgacgatttctaattcgtttgtgcctgaatccaataaaatatcgtattgttgtaaagacaattcaatccctcgctatccgcattcagtattgtactgtatatatcggctgtaaacggaaaaagtgaatgtattcgggccaactggccatgaactctttataaaaagatgcttttttctgatatcccattgactttttgacatcgagtggtaaaatagtcaaggatttttcaggaagaagggtgtaataaatgggtacagtagtcatattcgaccaagatcaaatgacggtgttagaagatatcagcaaaacggcttacctgcaaatgaaaaaagaggcgaaagagcgtcccgacaagcccgctccatacatcttatggcgggaagacgtcagctttgaatacgggtattaatgacattcgccacatatcacaatagatagatcatgatacaatgaagacaatcatttcagctggttgtcttatttttttctgaaaaaaggtatgttttcacatatcggacatatactcgggatagttcaataaaaagatgacaaatgctcagctagtggtaaaataggataaactcaatatatagtataaggtgatgaattatggaacatttgcttaatccgaatgtaaaagaaattgaaatttcaggaattcgcaaattctcaaatcttgtagctcagcacgataatgtcatttcgcttacgatcggccagccggatttcttcacgccgcaccatgtcaaagcggctgccaaaaaggcaatcgacgagaacgcaacggcatatactccgaacgcgggcggccttgagctgagacaggccgtacagctttatatgaagaaaaaagctgatttgaattatgaggctgaaactgaaatcattgtcacaaccggagcgagccaagcgattgacgcgtctttgcggacgattttatctccaggcgatgaagttattctccccggaccgatatatccgggctacgaaccgatcatccgcatgtcgggcgccgttccggttcatgtggatacgacgacacacggatttaagctgacggcgcggcttattgaagaatcgctgacaccaaaaacaaaatgcgtcattcttccttatccgtcaaatccgaccggtgtgacattgtctgaggaagagctgcaaaacatcgcagccgtcctgaagggcagaaatgtttttgtcctgtctgatgagatttacagcgaattaacctatgacagaccgcattattcgatcgcgtcttatttgagagaccagacgatcgtcatcaacggcctgtcaaaatcacacagcatgacgggctggagaatcggtttcattttcgcaccgaaagaaattgccaagcacatcttaaaagttcaccaatacagtgtgacatgcgcgtcttcaatctctcagaaagcggctcttgaagcggtgacaaacggtgttgatgatgcgcttattatgagagaacagtataaaaagcggcttgactatgtatatgaccgtcttgtttcaatggggcttgacgtcgtaaagccgtcaggcgcattttatatcttcccttccattaagtcattcggaatgtcatcgtttgattttagtatggctcttttagaggatgcaggtgtggctcttgtgcccggcagctcgttttcaaagttgggtgaagggtatgtgaggctgtcattcgcatattcactggatacattgagagaaggcttggaccggctggaagcatttattttaaaaacgagagaatccatgcagactatttaaacaacggcataacgccgttgttttttttattgtttcgggaatgtaatgtgaaaggccgtgcctctgtccggtttgctgtctacttggatggctccctggtggtttttaataaggttgaatgtgaccatcagccccaggccggttcctttttctttcgttgtcaaaaacggttcgcctattcgtttcagcacgttttccggtatcccgtcgccctcgtctttcaccgtcacattaacggaatactcatcttctgtcatgatgatgtgaaccgttcccccatccggcatcgactcaacggcatttttaatcagattgataaacacctgtttcagctgattttgatcaccgttaatatacatgctgtcatgttcgtaatccgttttgataaaaatccctttaagattcgcctgcgtctctaaaagagcggtcacttcacttataattttctttaagtttacacgctctttcacggcgttttgctgaggtttggcaagcattaaaagctcacttaaaattaattcgattctgctcagttcggaaaacacaatttcaaagtaatgttcgttttcctccatcgtcggcttcatgagctgtaaaaatcctttgatcgccgtcagcggattgcggatttcgtgagcgatccccgccgccagctgccctgcgatagacagcttttccgacttcagcattaattcctccgtctgcttccgctcagaaatgtcacgcagaatgacctgcacggccgtttctccgaaaaacgtcgtcggaatgcagaccatttccgtgtagatcagccggtttttaaaggtaaaccacgattgcttaatgatttctgactcggtctttcggttgataatattttggatccgctgtttcacgccgtcatgatcacagggatgaagctgatcatagacgtttttcccgattaaatcttcatatgtttcagcctcaaacagcgaaatgcccgattcattcatgaatacccacttatcattgtgaatcacggcgatcgtgtcaattgaattctgaatgaggagctgataacgctctctgcttttttgcagaatcgtttggaattttttccgtgaagaaatatcaatcagaagcagcaattccgcccgctgatttttatatgtcgtcggtgccgccttcacttctaaatgaacgggcgtgccgtcgagccttctccacgtctgttcgatcattccgacttccattcctttttgcatccgcacaattcggtttttcacaatgtcgtgatactcttcttcaataaactcataggagcgcctgccgattacctcgtctttgctttcggctcccagcatggcaagcatcgcgttgttggcgtaggcgattgtgccgttgatgctgacatataaaggattcggcagcatttcaacaagacgctcgaattcgccgtttccagccgcatcttccgactgttgttctgccttttgcttcttttgttcatacatataaggccggcggggcgtcttctcctcaagcaccttgattttgaggatgatttcccgatccgtcccctccatttgcggtgtgacaatttccacacccgcttcaagccatacgatggtatgatcttttttaataagacgaaaggtgcaaggcatcaaatgatgctcattatagaagtaactttcaaccaaaaattgatcttcttcatgcaggaacgttttgagaaatgacccgatcatctcttcctgagaataactgaagtacgatttacagtttgcggaaatatacataatacgcccgttagacgtcaaaacggcatgaagatcggttttcgattgaaactgtttgacatgctgagtatcctgttccacagaatccctcctttgcattatactcgcactgcaggctggacacggactgatataaaaagaaattccactagattgattcgctaaaaaatgagcattctccttctattcttattgtgaacgtcaattttcctgaatgaaagaaagggcgcacgagatgttcggccgccctttcatttgttattttttattgtatttcttttcaagttctttgtaagcgtcaattgctcccttagcaatgtttttgcttacatgatctttatcatttccaacagacggaacgacgacgctgaatgccactcttggatgctctgacggataatagccgacaaaggtcaggttatacgtgtacttcccccaccagtttttgttcgtgccgtaatagtgcgtctccgcggttcccgtttttccggaaacatcagcgccggaaccttggaatgttgaataagccgttccttgaggtgagcttgtgaccaatttcattcctttatgaacttggtcaaaatcgctcggactgttatttactttgttcaaaattttaatatcccgctgttcaatcgcttttccaatcttatttttgctgtccggttcatgaatgcttgtgacgatccgcggctggacgcgatacccgccgtttgcgatggctgaaatatattgagccatttgaagcggcgtatacgtatcaaactgtccgatcgcaaagtcaagcagcaatcccccgaccatttgcggatttgactgcatgcccgctgattcctgcggaagatcaatcccggtcttcacacccaaaccgaattgggcgtagtagttgcgcatttttttaatatcgtctaatccggcaggcagcgtgccgtacggcctgtaggtaatgccggcgatatgcatggccacatgaaacatatacacgtttgaacttctttgcagcgcggtcagctcagtaatggctcccatttgtgtccacgattgttttctcgttttgcctttaaatacaagcggtgcatcgacaaacgttttataatgcgggaggccgctttggtaacccgcgagaacagtcgctcctttaacagaagagcccatctcatattgggtcgtaaatgctccgatcgcaaaatcctgtgttttatttgtttcgagatcgatgcgtttccccgccattgagagaatatccccgttgttcgggtccatcatgacggcaaatcctctgtcaaccatatagttgcctgcggcgcggcttcttctcagctctttttcaatgactttttcgactttcgactgtaattccatatcgagcgagagttgcagatcgtagcctctgctgccttcatcgacgggcttttggctgacgacctcacctttgctgttttccacatactctactttttctttatgcgcgtttaaatagtcctcatactgatattcgatgtagctttttcccacccggtcattcagtgagtagcctcttgtgacatagtaatctttccgttcgcccaacaatccctgttccggtgtcgtcacaccgccgaacagagagtacagcgttttgtcgtatggatattttcgcgtccagtcattgatcacgtcaatgccggggagctctttcaggtgctcggatacgacggaaacttcttcatatgtcagatcgctttttggtttttgcttgttgttttcatgctcgtcaagcaatgaaccgctgtttccgtttccgttcagcttattcgggtccattgatttgacgacttgcggctgataggcgttgccgcttgaaaaacgcgtataaatcgccgcaatttgcagctcttttttatcttgtttgatcgcatcaatctcctgcttcggaacgcgttcaatctggcgtttgtacacttcttgggatttcaggctgttttctgaatccttcataagcttttccgccttcttcggatgtgccgcaagccagtaatcaatgatatttcgatccttcataaattcagtatcaatatgaatcagtgcggcgagattttttgccgttttcaatttgtcctttgccgaggtttttgaggtagaaacgtatacaatttcaggcacagcctggttatcaaccgccaccctgttccgcttgtcatacatttttccccgcggtgtcggataataggcggtttttgcatttgccttctccgcatcctggcggtgtttatccccttcgacaatctggacgatgccgagtttaaaaatcagtgccgtaaagagaagaaacacaatcaaaaaatagagattcattctcagcgctctgtaacgtttcgtttttttctttggttcgcgcgcgacttcagccactttctgttacacctctcaaatcattgaatatatttacataaacagattttaattgtaacatttttgtaaaagttgttacagcgaaaacgggtaaaaaaaactgtcaagatcaaattatcttaaaatatatctaacacttcaaataatttgaagagatgtaacggattttaaaaaataaatacagatcgtttttactgatataaagccatttttctgtgctcaattacaattatgacaaacgtttgttgtcaaaggaaatggctgcctgcattatgacaaaaaagctgtgataagatttttcatgtagaaaaaaacaacttctctgggaggctataaacttatgaaaaaagcatttctcttatctgccgccgcggcagtcagtttgattacattcggaggcattcagcaggcatctgcaaaagagctgtcatgccagcacgtcgttactgtgaaaaaaggaaacaccgtacagcatctgactcttcaagaggctgttgaaaaactacatatgaaaacgagcgtgaaaaagctgaacgttaaaaatgagaaagaactgactcagctgctgcaaaaacacgcaaagcattctgatatgacagttaaagacgttcaaaaagaaacaccggaaaaaacggccccgacagctgccgaaaaaccgaaagccgatcaaaaccagacggctgacaatgcaaagcagacagataatacaaacaacagcagcgagaaaactccttcatcagtcagtgcgtatgaaaagaaagtcgttgaattgacaaatgcagagagacaaaagcaaggcttaaaacctctgcagattgatgaaaaattaagcaaatcagctcacgcaaaatcacaagatatgaaagacaaaaactatttcgatcaccaaagtccgacttacggctcacctttcgatatgatgaagtctttcggaatcacttataaaactgccggtgaaaatatcgccaaagggcagacgactcctgaagccgtcgttaaagcttggatgaacagtgaaggccacagaaagaacatcatgaatcctgagttcactcaaatcggtgtgggttatgtagaatcaggaaacatctggacacagcaattcatcggaaaataaataaaaaaagattgcccggcgggcaatcttttttttatttcacccaaagcttataaatgctttgagttccgctgttttcttcaccttgcgcggaaagcttgtcgtacaatgatttggccagcgccaatccgggcatttcttctcccatgagctccgcttcttcaagggcaatgcccatgtctttaataaagtgtttcacgtaaaatccgggcgcaaaatcgcctttcagcatacggggagcgaggtttgacaatgaccagctgccagccgctccggttgtaatgcttttcagcacttgttccgggttcagaccggatttttccgcgtaagccatcgcttcagccactccgaccatccccgctgcaatcgcgatctgattgcacattttcgtatgctggccgctgccagccggcccttgatactgaatattttcccccataacggagaaaagcggcaggcatgcttcaaacgcttctttttctcctccggccataatggcaagcgttccgttcctcgcgccgatgtctccgccggaaacgggtgcatccagggcgtgaatggacttttctttggctttctccgctattttcttcgccagagatggttttgatgtcgtcatatcaatgacaaacgccccttcttttgcatgacggagaatgccgctttcaccgagatagatttcctcgacatcactcggatagccgaccatggtaataatgatgtctgctttttccgaaaggtctttgaccgtctcctgccagaccgctcccttattcagaacctcttccgctttgtgtttcgtacgcgtgtagactaaaacaggatagcccgcttctaaaatgtgcgatgccatactgtttcccatgacgcccaaaccgataaatcctaccgttttgttcactgcgctttcctcccctgatgcgattcatatatcactctttcatgtctatattaccatattataggctgatagagaccgcgtcacaaggtgaatttagaaatggcgctgatcagatcttcgcttgcgctctttaacatatcagtcgattgcttcactttttcaagcgtaacgagctgttcatcagtagaagcattcacttcttccgccgctgccgcagattcttgagaaatggcggagatgctttgaatcgcttcttgaatcgaggcttgttcttcactcattttttgaatgtcattgtaaatatgatctataccttgaacgagagactgcatttccgttgtaatcagattgagaacctcacccgtttcatgaatggcgctgttttgttcatcattcattctgcttgcctcaatcatcgcgtgtgacgcttcttttgtctcagattgaatcagacggaccgtctcactgatatggccggaagaaagagctgattgttcagcaagcttgcggacttcttccgcgacgacggcaaagccccgtccgctttctcccgctcttgcggcttctatgctcgcattcagcgccaagagattcgtctggtctgaaatagcggatattgccgtcacgacttcttctatgtttttcgtttgttcttccaggtcattcagcattgcctctacttttttcgtttctgaattggcttcgtttgacttcatcagcagctgcccgagcgcgtccaatcctttgtagctggcatcctctgaagattttgagagttgttttatgctgcctgcgcgatctgcgattccttttattttgactgagagattttctgatttttcgttgatcgtctcaacctctgacgcttgctctgtcgctccggcggcgacttcctctatcgcttttgcgatttgtccgctcgtttcatttgtttcttgtgaaatgacggttagctggtcagatgtatcagacacattttctgaggaggccttgacctgttcgaccatctctttcatattttcaaccatttggttaaagtcttttgttaactcgcctacttcatcttttgatttcgtctgggcgcggacggttaaatctcccgctgagactgaatttgtttttgcgatcagctgctgaatcggcccggttatcgtttttgcgaggaaatagctgagtccgatcgtaatcacaagggcgatcagtgacataaaaatgctcaccgtgttcattttgtcggctactcccatcagctgatctttttcaaactgcgttccgactttccaccctgtttcttttaccgtttggtagacgaccatgttcccctgcagctctttgatgccttctttgtccgcagtgatgtcttttaacgtctgatcttccgaaatattttttccctgttttgccggatgggccagaagagagccgttttcatccgccaaaaacgcaaatcctttatacggaaccttttgctcgttgaccatgctctgaatggaggacagcttcaaatctaagctcgccactccgacgacggttccgctgttttgaatggcttttgacgccgtcacgatcatgtctcccgtcactgcatctttataagggtcagtccagacaaccttatcgggtttttcagccgccatcttataccacgttcgatttgtcagatcatagtctttggcaaaatcggcctttggatatgtaaacatttgtttgtttgcggttccgacgtacgcaagcgcgacatatttgtcattctgtccgatctgttttaactcatcgttaaaaagccgcgcggtttctttcttcccatctgatagaaaagaccgggacaattcaccgtctgctaatctcattaatacggtctcatcatttttcagctgaagctcaatgttctgaccgagtgaattggtgacattctctgtcgtacgttttgcttcctccgtcatcatcggctttaatgtcaaatatgaagaaaccgttaaaaaaacaaccgttacaataagcattgccgatacaaacacagcaattttgatatgcatttttttaaacataaccatcccctcctgagagttatatcggtctttcggccaagaaaatgaataaatcttgaaataaatatcaaacatttccgtcatttgtcgcagcaaaaaaaagagccgtcatgccgacagctccgccttacgtaaaatattcgattttcgctttcggaaaataggtttcgatataagattcgagtgtttcccttaaggcatgttcttcgtctttttggtatatatatttgccgattccgtagcgtccccatttgtacctgcgcttttcttcatcaagctcaagctttgttttcggatagttcttctcaatcacccgtttggccggttttgtaaaacgatgctggatcagttcaaatgtgatgtcatgccgaacgtcttcatcaagcgccgcatccagtttctcaaacagctccttatagccttcctcccagccatcatgaatataaataggcgccacgatgaaaccgagcggatagcccgctttagcgactttgacggcggcttcgatccgtttgtcgagcggagaagttcccggttcaaagttttttatgacataatccgcattgatgctgaatctgaacctagtctttccgttatgttttgcatcaagcaaatgatcgacgtggtgaaatttagtcacgaatctgagctgccccaattcgctttgtccgaaatgttcaatggctctttttaatgtatgtgtcagatgatcgattccgacgatatcagacgtacaagaggcttcaaatcttgtaaattccggcgctcgttctttcatatactcatcagcctgatccagaatctcttctacattgacatatgtccggatgtaaggctttgaccccatcgtcgtctgcaggtagcaatagtggcaatgccccatacagcctgtcgcaaatggaatggcatattcggcggacggctttgaagaatcgaatttcagtgttttccggacgccgattaccaatgttgatttcgcgttccggtattgctgcaagtgatttttccccggaatattccggacttgattatgcgatgttgtttctctgatctcaagccccatattttcaaacttattcttcagctcttgtcctaacgggtattcgagcgctctcggttctatataaacaagctggggcacaaacggcttcagcatgaactgacactcccttttttcatattctcatgttgttactttccgtttaaaagagagtgaatatgcgttgtaaacatttcctttgatcaatgatatcggtcttcttcaaaaagctcgctgtaaagcgcttccgcttcctcatatgttgaaaagaccgcgtcatcttcggccagcggatgataggtttcgtataaaaacagagacagttctccctcatgatatgggtgatggacgatctccgcctctttaatatgggcaacattggcggcatgcggattgcggtaaatcacatagaccgtatcccccgctgcaaatgattttgtcataataatccctcctgttgaacgttattgttccccccttttttccgaatatgaaaaaaaccagacggcttataccgtctggctgttgtattacttattgaatgtttctttaacgaatgcgacaacctcttctgtcgtgctcatagacaagattgtttctttgaatgattcagcttcttttttagaaagcttgctgatctgcgttcttgccggaaggatggatgtagcgctcattgagaactcatctaagcctaagccgagaagaatcggaatcgcaatttcgtctcccgccatttctccgcacattccgacccatttgccctctttgtgagcggcttcaataacaagggtgatcagacggagaatcgccgggttgtatggctgatacagataagctacgcgctcgttcatgcggtcagcagccatcgtgtattggatcaagtcatttgttccgatactgaagaagtcaacttctgtagcaaactgatctgcgataacggctgtagacggaatctctaccatcataccgacttcaatatcgtcagaaaccgctacgccggcttcgacgagtttttctttttcttcgagaagaatcgctttcgcctgtttaaactcgtttactgtcgcaatcatcgggaacatgatttttaagtttccgtatgtacttgcacgaagcagcgcacgaagctgagttctgaagatttcttgctcttcaaggcaaaggcggatggctctgtagcctaagaacgggttcatttctttagggagctgcaggtaaggaagctctttgtcgccgccgatatccaatgtccgcacgacaactgattttccttccatacgctcaagaaccgttttataagcgtcaaactgctcgtcttccgtcggaagctggtcgcgtcccatgtaaaggaattccgtacggtaaagccctacagcttctcctccgttttcaagaacgccttttacatcgtcaggtgtgccgatgtttgcggcaagctctacatgatggccgtcttttgaaacagtcggttcattgacgagcttcgcccactcagctttttgcgccaggtaagcactgtgcttttcttcatatttctttaacgtttcactggaaggatcgatgatcacatcaccatcgatgccgtctacgattaccgtaacaccgttttcaattgtccctgtagccgcttttgtgccgacaacagccggaatttcaagcgaacgggccatgatcgcggagtgtgaagtgcgtccgccgatatcagttgtaaaaccttttacaaactggcggtttaattgcgccgtatcagacggtgtcaaatcttcagccacgataacaacctcttctgagatcatgctcgggttcggaatttccacgcccagcaggtgccccgtcacacgttttgttacgtcacggatatccgccgcacgctctttcatgtattcgttatccattgattcaaacatagtaacgaacatggaagctgtttctttcaaagcgaattcagcattgactgaatctgtgctgattttctcctttaccgggttcagcagctcaggatcactcagaactaaaaggtgcgcggagaaaatgtcagctttgtcttgtcccagttcttttaaagcatgctctttaattttttcaagctcttctttagaacgtacaatcgcttcatcaaaacggcttacttcagccgcagcatcagcaatgtttttcttttcaaccgttaagtccggctcttcaagccggtatgctttcgcaatcgcaattccggctgaagcgcctattccttttaattcttgcattactcgccgagtccttcgcttttcattgtttcttctaaagcgttaagagcatcgttttcgtcagcgcctgaagcggaaattgtgatttcagcgcctttagcgatacctagagacataacgcccatgattgacttaaggtttactgttttgccgttatattctaagtttacgtcagcatcgtatttgcttgcagtctgtacaagaactgtcgcaggacgagcgtggattccggaatctgctgttactttaaatgttttttgtgccatgattatcattctcctttaaattaaagctattttactacacaatattatatcatacagccgtacttgtcatctgacaagcacggcgtatttatatgcttattttccgattttcacaatatctttttgttcccgttttacggtaccttcggccgaaagggaaatcgcttcaccctcggcaagatttgtaaagacaatcggtgtcattaatgaaggaacatgaggtttaaccgcttcaagatcaacttcaagcagcttttgccccggttcaacccggtcaccctctgaaacaaaagaagtgaatccttcgcctttcaggctgactgtgtcgattccgaaatgaatcaggatctctcttccgccgtcagactgaagaccgatcgcatgttttgtcgggaaaacattcagcacttttccgcggacaggcgatacgacgattccttcttcaggaagaatcgcaaaaccgtcacccatcatttttcctgagaacacctggtcaggcacatcggtaatcggatggatttcgccggtgatcggagaagcgaacacttcttcaccctgctcgtttcggagcggatctgcgataacctcctcaacctgctggctgacttcttcttgtgcggatactttcggttcagggcgcggcgtgcgtccggcgataatatcctgcatctgtgtttttaaaccgtcagaacgcgggccgaaaatggcctgaatgttgtttccgacttcaagaacgcctgaggcgccaagctgtttcaaacgagtcttatccactttcttctggtcgttgaccgtaacgcggagtctcgtgatacaagcgtcaaggtgcttaatgttttcctggtcacccattgcctgcaggatttcataaggaaggtcgccggcttcgcctgaggcgcccgcaccttcatccgcagcctcttcttcacggcccggcgttttcagattgaactttctgatcgcaaaccggaaaccgaagtagtaaataacggctaatcctaggccgaccggaatgacaagccaccaagcggtccggttaggcagaattccgaacaggaagtagtcaatcagaccgcctgagaacgtcataccgatttttacatgcagcagctgcataaccataaaggaaagtcccgcgaatacgcagtgaatcgcaaacaggataggagccacaaataagaatgagaattcaagcggctcggtaattcccgttaagaaacttgtcagagcggcagaacccatgattccggctacaagttttttcttttcaggcttcgcttcatgatagattgcaagcgctgccgccggaagaccgaacatcataaacggatatttccccgtcataaatgttcccgccgtcagctgtacgccgtctttgatctgagccatgaaaatccgctgatctccgcggatgatgtctccggccgcatctttatagctgaaaaattcataccagaacggcgagtagaaaatgtgatgaagaccgaacggaatcaatgaccgctcaatcatcccgaaaataaaggccgccaaggttggattcgcttccacaagacccgtggagaaggaattcagaccgtgctggatcggaggccagatcactaacataataagtccgagaattaatgcggaaattgatgtgataatcgggacgaaccgcttacccgcaaagaatccgaggtactgcggaagttcaattttataaaacttgttgaacaataacgcggccaggaccccgacgataataccgccgaacacgccagtcgccaaagtgggtatccccagcatgttaatataggccggatggttttccgcaaaaaactttgcccgttcaattttgtcagacggaatactgccgttcgccataagcacggcgctcatggatacgttcatgaccaggtatccgataatggccgcaattccggcaacaccgtctccgttggcaagaccgatcgcaacccctactgcaaaaagaagcggcaggttgtcaaatacgatttggccggcgctttccatgacgttcgccacaagctgaacgttatcattgcttaagaaatgcatgacttgaatcatatctttgttctgcatggcattccctaacgcaagcaagatccccgcagccggtaaaatcgcaaccggaagcataagagcacggccgattttctggagaacgccgaataatgctttaaacataaaagatgtacctcctctgttagctagtgtgaccttacagcgaaaattcatgacaacgaattcactggcgcaagtcttcagtttaaccgtttacatttgcccttttacacaacaaaaaaggcatgagtaaaaagggtgtgcaaaataacgggatcgttcttcccgttttttaccctcaatcactcatgcctgatcgaatcagtgacacgtttttaaggtttcaactgaaattatgaaattttattggttaatcggtacaaatgaagcgtgagataaaccgcttccgcctcatgaactggttttttcagtatttgctgcaagatttttatcagtttccaagcagtattgtagcatagcgggtattcatttttcaataataacattaacttttctggttcttttgtctgctcttcccgattaatcctgtctatggtaaatctgatatgccggatcagccgcaaatagtggacgctttctttattcactttcatctggaaagagtcctcaatcacctgaacaaggcgggacatcagctgcgaatgctgattgacctctgaaaggggccgattcgtcagggcggaatggatatgcagagcgataaagccgatctctccttcaggaaggcagattcccgtcttttcattaatcatgccgacgacttcacgggcaatttggaattcttccggataaagcgtttcggtttccatgagaaacgggtttttaatgtcaaacccctgctgcagccgctttaccgcaaaggcgatatggtcagtcagcgcaatatggatatgctcatttaacggttggcttgtccgcttcttgatatgataaatgacgtcattggagatgtcgacaagtgtctcgtccacataaccgaggagctttttaaattgtttttgttctttttcatcctttaagatgaacatcttgtcataccctttatcttcaatgacatccgcttgtttttttccaaagccgatcccttttccgattaagacgacctcactgtatctatcatgtgttgcgatgagcacattgttatttaataccttttcaactgtaaaggaccccttcatgatcctcagctcctttgtcattcaatacctcatatcgtacaaaacgaacggaaagcgcgtcaattctttttttagacggttgatcgttcaataaggcggtaatcaagaactttccttcccggaggcccgccgctgatccggttctcaagcatgtgaaaagcctgctttcccatttctttcgtttgtatatctattgtggaaatacctaacatcttgctgatatcatgattgtcgatgctcaaaatcgcaagctcttccgggatgcgcgtcccgtttgccttggcttcaaggtaaagacctgcggatacttgatcattcgccgcaaacagcgcagtcggtttgtcatcccagctcttccatctatgaaaaagggctttcccgtcaagcagcgtcagcaccttttccacaaccagctcttccctgtaaggctgcccgatcttcttcagcgcctctttgtatgcggcgattcggacttgactgttttttcccttttttctggccaggcagatcgctattttccggtgtcccttttctatcagataatccagaccgtgccgaaatgcttcccgatgtggattactgatggaggaaagccctgccgcatcagtgtactggcagaggatgagcggttctttcacggcaagcaaatgctcatcaggaattgctttggagcagataatcaggccgtccacttggcgctcctgtaattgtgataaggcaaaacgttctttttgctgctcataatctgtctggtataaacaaagatgcacgcctgacgcttcggcagcctcggcaatacctgcaacaaggtctgcaaaatacggaaggttcaccgacggaagcacaacgccgatcatatcggaaaaacctttggataaatgaacagcatgaatgttgcgcgtgtatccgagcgattgcatcgcttttttcactctttctcttttgtccttacttacataaggatgatcgtttaaaactcttgataccgttgtaacggaaaccccggcagcgccggcaatgtctctgatcgtagccatggcgtcccccctttctttttttcccttgatctggaatgcgtttcatacagtaagctagaaacagatacatcctatccgtttgaaaggagaagaacagcgatggggattctttgcttaatcggtttgtgtctggccatactcggcggcagttaccttgccctgcggcccctgaatgaaaagcatgacatcaaaccatttcagcattttgatgattttttcatttaaaaggtgataaaaaaggacgctgcgttccagaaccgtccttttttatcacaaagctttctatttcagaatcgttaattctttcggatactgcgttaatgcttcggcgccgtcttttgtgacaaacacatcgtcttctatgcgcacgccgccgacatccggcacgtaaattcccggttctatcgtgtacaccatgccttctttgaggagtgtgtcgttcgcgctgctcattgatggatattcgtgaaccgaaatcccgagtccgtggccgaggcggtgcgggaaatagtctccgtatccggctttttcaataatgccgcgggcttttaaatcaagatcgccgattctgacgccgggtttacttaattgaagcgccgtctgttcagctttaagcaccgtttcgtaaatctcttcctgtttcgggctgattgattggtatgcgaatgttctcgtaatgtctgaacagtagccgtcaagaataacgcccagatcaaacagaacaaaatccccttttttcaaccggtctgcacccggattcccatggggctggcctgatttttccccgaacagcaccatcgttgaaaatgacatgccctgcacaccttttttcttcagctcaaactcaatctgcgcgagtacttcggtttcactcacaccctctttaagcgccgcgacaccgacttcaactccgtaatccgcgagttttgccgcttccctgagaatgctgatttccttctcatcttttacgagacggaattggttgagcgtttcttctgccgaaacaaatgccgcgcccccagaagcttgtttgagctgttctgagcgggaaagagagatcgaatccttttcaaccgcgatggaatcaagcggcacatttcgttttgtgagctcggctttgatcagctcccacggatcttcgtgatcgccgtagccgataataccatgctcccaaccggcgcttcgggcttgtccgtcttccattcccggacaaacgaaaaacggctcctgttcctgaaacaggaacaatcccattaaccgctcatgcggatccgtgtaaaaatcagttaaataaaatacgttttcctttgtatgtataaacgccgcatcatgtccttcttttttcagccaagatgaaacacgttctaatctgttcattttttgattttcctccttaccaaagtgactctttattcattctatcagttttccggcgtttatgctgtgaacgaacattaaaaaaacagccgcccgatgtgcggctgtcatgtttattttaataatctcagtccgttcagtataaccagaatcgtgctcccctcatggccgattacgccaaacggcagttccatcacctgcagaaagttagcgcagatcaaaaggcagatgaccgagagcgagaaaacaatattctgcttaataatccggttcattttccttgaaagtctgcacattttcacaagcttgtgaagatcatttttcataaggactaagtcagccgtttctagagccacgtccgtgcccccgcccatcgcaataccgacgtcagcggttttcagagcgggcgcgtcattaatgccgtctccgaccatggcgattgtgccgtacgtttctttcagcttcttcacttcttttgccttttggtccggcagacaatcggcaacaaccgtcgtcatgcccgcctctttcgcgatggcagccgcagtttcagactgatcgccggtgagcatggctgtttgaatgcccagtgattcaagctcagccatcacggctttggcttcaggccggatttgatcctttaaggcgaagcagcccgcaatccggtcttctttcttaacaaaaaccagtgtaaagcctttatcctttaattcttttcccgatgtctgcaaaaaagcatctgccgcatgttcacctgcaaatcccgcttttccgaccatccatttgacgccttctatttcagcctgaacaccgaatccggacgtctcgtcaatcgatagatggcctgcgggcgcggcgccccggctttcggcaaattcagctatcgcttttgcaagcgggtggcttgattgcttttctatcgcatataccgcctgcatgatctcatcttcactcacattttccgctgcttgaaatgccgcgactgccggctgtccctttgtgaccgtgccggttttgtcaaatgcgatcatccgtacgcttcccagctgctctaaaaacacacttcctttaaccaataatccgttgcgggccccatttgagataagggaaagcgcagcgggcataatagaagcaacaagcgcgcacggggaggcgaccaccataaacaccatcgcccggtaaaaggtttcactccagctccagcctaaagcgaaatgaggaacgaataaaagcacagccacggctaacagcacgcctttgacatagacactttcgaatcgctcaataaatgcctgagccggtgacacgctgttttgggctgattccaccagccggatgatttttctgaataaagactgttcatttgttttcgtcacacggaccgttaaggagccgtttccgtttaccgttcctgtaaacacagaatctcctgctgttttttccgccggcatcgcttcacccgtcagcgccgattcatcgaggctcgtcacgccagactcaataatcccgtctgccgctacgcgttcgcccggcttaatgacgatcatgtcaccgatcttaagttcagcagccggcacccgcttttcccgtccgtccgcaagcagggtcgcttcctccggttccagtttcatcaaggatgttaaatcacggctgcttttattcatcgtatatgtttcgagcgcgccgcttaacgaaaaaataaagataagaactgcgccttccgcccaataaccgatcagggcggagccgacagccgcaaatatcatcagcagttccacatttaacgccttcgtctcaatggtatcctcaattccctcttttgcttttgcaaatcccccgatcaggaaggcaaggatatacaaagtgacggacaggccttttgtttcggtaaaaaaccaggccgcaagaataaggacgccggatacgagcgccgcaatgagttctgcatgctggagccacctttttccggcccgctcttcttgtatcttctgctgttgtgaatgggtttgtgtcatcacttgttcattcattatgaattctcctctctaattgagaacgcaaatcatcttcaattccctgataaaagtaaaacagccgcctgacaggcagcattttcacagtgttatcgcagtgttttctttattatagcatgccggcggaagatttcaattataattgttttaatttctttatgataataattatcattagtgtttcttcagctgttcattatatgcaaaaaaggtgcgggaggaattcctcccgcacctttttatttctctgaccattcttttaattgtgaggcggtcatcggaccgacgatctttttttcgatttctcctttttcattcagcagaaatgacgtgggaatcgtcatgacatcgtattccttcataagctcgcctttcgtgtcaagaacaatcgggaatgtgagatggtgctgagtgacaaagttttgaacggtatttttatttcgctcggcattcatcaaatttaccgttacaaggcttacatcatcagactgatgctgttcaaaataggtttggaattgcggcagttcttttttgcacggcggacaccacgatgtccaaaaatgcaaaatcgttttctgccctttattcggaatcgatatttcgtctccttcaatcgtcttcatcagaaacacggcgggaactgcctgtttttctgatgaggcttttgcttcaggcatccaaacggcggcagctatcaaaaggactgcacatacaattagacggtttttatgcatatgatcttcctttcacgcgtttcggatagcttgcccttccttattgaaatgtatcagccttttcagctttcgatccggggagctgttcttccgccgcccgtcaaaaacacggagacaccgaggtctttgcagatcgtcacgtaatgtaaacttgtcagaagaatcatgccggtattcataccgagtataatgccgagcatttgcaattccggcatagaaccgagcacatacatcattgaaagacctacaatgctgctccatacgttatgataaaacgccgttttcacgtggccgatgccgatcagacaggcttgaagcggcatcacaaacagatgaaaaagaaaaaacggccacaaaagctgcaaataatactgcgcttccggagactgaaaaaacaaatgggtcagcgggcccgcgaactgaaacatgacccagaccgccggaatgccgtagccgaatgtaataaaaatcgcttgtctcagccgtttcagcacaatatcatattgggacagcgcatacgcttctgaaatgctgggaatcataacgaccatcagcgaatgggcgataaatgcgggaaacgaaccgattgtcatcgctacaccggcaagcattccgtattgatcaatcgcggcggtcccggctgccccggacgccagcagcgctcctttaaccaagaagggttcaattgcgtttgtcaccgcatgaaatatacgaagtcccgttgtcgggatggatacggccaggaggcgtttccgcacgtctttcccgcgaagatgaatgtgctgatggccggaaagcgccctccgcgccaaaataaactgcgtatacagataaacgaacaccacaacatcgcttgcgaccagcacaaataacgaaataagcacggccatatcaatttcaaaagagtaccattgaaaaaagataaacagacaaagcacttgaatgatttttttcaagacattcgcaaccgcgatttttcccatttgctgcacacccataaaataacctctggcgatggatgtaaaagcgacgactggaatcagcccgatgacaatccctttaataaacgggtgatacgtatcgaatacaggaatgaacggcagcgcgatgcttgcggccgcggttgaaaacgcggtaaaaacggcggtcattctgaaggcatgccgaagcatgctttcatgcagcttctgattggattccgcgatgaattttgaaatagagatcggaagctccagactggcgatcacgataattaaaaaaatggtgggcagaatgctcatgtaaagccccatcccatgctcgccaagctcccgcgccagtatcatattcacgacaaattccagacattccgcgaaaaaggcggcgatggataaaagaatgatccctttcacaaatcgattcatggtgtctctccttgtctcacgttcttccatcatcatatgagacaagttctgaaaatattttcgatttctcaaaattgaaaaaagcatagcggggatattttttatcccgctatgcttcttacatcgcaaatacgtgtctgccgatccgttcgataatttttcgggaacggatccagtggtcagatgccgttttcggattgtagaaaaacaacgcgttcgtttctctgcccggatggtctagcgcctcatttgcggcggcgatggaatccttatccggcttttgattaatgcttccgtttgctaccggttcaaatgcattcctttgatagatcacgccccgaatggtatccgggaaaccgtttttttcagtacggttcagcactacgctggctaccgcaaccttccctttataagattcacctttcgcttctgcgtgaacgagacgtgacaggagctgtctgtcagcgcgggaatacgtttttttcggcggctgataagccgtctcgtccggttttgctttcttctcttggtgagatgacagctttatcggttggatagagtgcttatgatccgtttctgagagcttcggaaccgggctttttttatttaaatcagcaaccagtgtgctgggttcttgctttggcttcttcgcaaaagtaaacagagcttctgtatgttcaatttttgatgcaggcataaaacatagaaaaaagacagccaaggcagcaaattttgtcgtcatacgatttcctccttaaatacttcactaccttaacaagagctgtacgcaaattcacggttaaagattttccaatgctcccaatcagcttttatgatggaagaagtttgttaacagccttgttattggcaggaaaacagccgtcattttcacaacattaaccaaatagcagtaaaagtatccatcggagggattttacattttgtttacatctgttacagccagatgaaataagcagcgaaaacaaaaaaagactcctcaagtgcgaggagccgtcagcttcttggctgttctaaatactggaagataacatctccgccctgctgggcaataccgcggaaatgcttaaaatcttcctgcttcgacaaaaccgctcgaaatgcaagaaaatgttctttctgcaccctgaattctttgatttcaccgatgcgcatttggttgatacgttctgaaatttcctcaggcagcaacgaatacagcctccttttctcggctttttcccgaaaaacaatataccatctttcccccgccgggacaatgattgagcgggctgatacccatatcgctttacttcttaaagaaaatactgcaaaatattttcaaacaggatttatgataaaggagaggaagctcgtgaaaattgctaaggttggaaacgtcattgaatttaaaaacggattaaccggtattgttgaaaaagtaaatgaaaactccgtcatcgttgatgtaaccatcatggataattatcgtgaccttgaattagattccctcactgtcgtcaaccataagaattataaaatcatcagagactcctattaaaccccccgaacaatccgaaccatttacatatcccgcacaaaagctgccgcccggcagctttttcaaatgaattcagatctcggtcatttccacaaaaaaatcatcggtctcatctttattgtaaagatttgtgacggatgtatagtagttggttattttaccgcggaattcaagcccacgctcgggcgccttgatgtcaaatgttttttcatacaaaaggacggcaatatcatgatacgtttcagaggtcaccttcaatacgaatgaaatcatacggccgtttttacccgcactttctttacaatcatacattttcagccttacaccgtttaactctaacggctccataacgaacactccttctttttacaggacatgctaccatgctggccattcctttacaattgatccgctccgaataagaaaaaacagcgcagtcctttacaaacatacgttccctattttataatgaaacagacgagctgccatccagcacccgtcacgtattgaagcggcgagtacactccccccgggtttactcgtctttttcttttctccaaatgatctctcttttccttatagaagttctgtgcaaatatcatgcacctttttggctgcgtggcagagacgaaaaatacccccgcttaaaaggcggggtatttaggttatagtccgagtccgtactccgtctgaaattaacgattatcaatcgtctccggatacatatcatgattcatcatccgatgttcggccattttttcgtattttgttcccggtctgccgtagtttgtatacgggtcaatggagattccgcctcttggcgtgaatttgccccatacttcaatgtagcgggggtccattaattcgatcaagtcattcatgatgatgttcatgcagtcctcgtggaaatctccgtggttgcggaagctgaaaagatacagctttaacgatttgctttccaccattttttcatccggaatatagctgatgtagatggttgcaaaatccggctgtcccgttttcgggcaaagcgacgtaaattccgggcagttgaatttaacgaaataatcacggttcacgtgtttattcggaaatgattccaaaacctccggcgcatattcaaataaatagtttgtcccttgattccccaggagcgtaactccttctaattctgattcttttcttgtcatataaatctccctttctattaaactccccgtttattgccccaaagcagcgtatgcagctgaggcaggactctgacgagattcagatccgaatcggctgaaaccttatcaacgagtgtttcgtattttccgagcagatgtgcgatcaatgcccggtcgtccgtcgtatggacgttatcgtttccgacctgaagataaaacgggatattcggataccgcttgtgcacggttttcgcgaattgcagatcttcatcattaaaaatgacgacctttaagctgaccgcgttaagcctttctgccgcatcaagcgaagacataatatgatcgagctttgcaaaatcggttgtcatccccgaacttggcggcttcggtgaaatcgtcaggtcgttaatcattgtgaaccaatcctgatagactgttccctgcgtttctaaagcggcgcgcaccccgtgctctttcagcagcagaatcagcgcgtcaagctgctttaacagcgccgggtttcctcctgagatggtgacatgagaaaaggcgtctccgccgatttctctcagctcgcggtaaatgtcttccgccgtcatccagcggatatcttttttggctgatccgtcccatgtaaaagcggagtcgcaccagctgcaggagtagtcacagcccgccgtgcggacgaacatggttttctggccgataaccatgccctccccttgtatcgtcggtccgaaaatttctaataccggaattcctttagccattcctatcaccttttttcgggcggtatacgcaatagcttgtcggggtttccctgacaaaaacctgcacgcagaccggctgattctccagtgtttcgaggtaggactgcaccttatcataaatcgttttggctacgacctcggtcgtcggcagtgaatatctgtcatcatcagaaaattcctcatggtcattcagcaatgtatggtcataagcgccgtgcaccaatttcttcagcacgctgaaattcacgagaaagcctgaatcgtccagttcatcccccgcaactgtaatatttactgtatacgtgtgcccgtggactctgctgcacgctccggcgctttcgcggggaataaagtgcgcggctgaaatgtgcatgtccttattcaactcaaacgaataaggatgctgaacctgcgggtaaatttgagaaagcaattagttccgctctcctttcattttcatatattcatcatatcctttattgcggagcaggcatgccgggcattcgccgcatccgtccgcaatgatgccgttatagcaagtcagtgtgttattctttacaaaatcaagcgcgccgagctcatccgcaagtttccacgtttctgctttgttcagccacataaggggcgtatgaatgacgaacggcttttccatcgccaagttgacggtgacgttgcaggatttgacaaactcgtcacggcagtccgggtagccgctgaaatcagtctcgcaaacaccggtaataatgtggcgcgcgccgatttgatatgcaagaatcgatgcaaaggataaaaatacaaggttgcgtcccggtacaaaggttgtcggcaattccccgtccttcgcttcaatttcgatatcatctcttgtcagcgcattcggcgcaagctgatttaaaagagacatatcaagcaagtggtttttgacaccgagcttttcggcaatcgattttgccacatcgatttcttcttggtgacgctgattataatggaatgtaacggtttccacttcttcaaagttttgcaaagcccataataaacaagtcgtgctgtcttggcctccgctgaacaccacaaccgctttttcttttttcatgtctttctctcccttatctatcattccataaaaaaagcgcctttttcggagaaggcgccctaaaaaacataaaaaaaccgtatccaaggatacagctcgtccttagttttttatagagggtgtagctagaacctctcccgcatcaatacggattttcttcttttttcacttttgctatcataccataatgttgtttcccgtgacaataaaaaaacagcctgaaccctgtgtcaggctgcaaaagcgggtttaagccccgcgtttcttccccggaaatgccatcagcgcaatcccgatcagaacaaataaagcaggccagaaaacagaaaccggaatgatcggctgatacgtcatcataaagcaaagtgctgtcaaggtcagcactgcaaccggaatgagcagcgccttctgtttcccgccgaacagccacagctcaaataaaccgaatgccgttgccaacaggtaaacaggccatgtcacatcggagtagaaccaattggttgccgtttcaaagacaaacaagatccccgtgatcaataagatgccgcccggtacgagaagccccgcgtttttgacaggtttcgggccgaaaatcggaatgtgaaaagcggcgcccagcaacagaatgagagcgggccagccgcgttcgctgatgacttcatttgcattggtgaatatgccgaaaatgcccgcggcgcacagaaccgccgcagcagtcaaaagccctctttgccttctgccgaacagccaggcttcaaacagcccgaatgcaacggcaaagaggtaaacaggcgatgtcatcgttgcgtatgtccaatccgtcagcgtttcaaaccataacaagccgcccgtcacaagcaaaatgccgcccggaataagaaggcccgatctttttttcggttgcataaaggcagcggcgtgaaacaaaagcgcggctgcgatgatcaaaagcggccacagccccgtcatcagcataccggcaaagcatagtgctcccgcggctgtcaggataaaagcaggaatcaatacgccgatctttctcccgccgaaataccacagctcaaacagaccgagagcaggcgcccatatataaacaggccacgtcatgcctgaatacgtccatcccgttgcggtctcaaaacaaaacaggcagcccagcacaagaaacataccgccgggaacgagcagtcccgcctgttcaggcgtttttttcgcaaaaataaatccggcgtgaaaccctgcggacattataatgaaaagaaacggccacgccgaacctgcggatatatgtataactcccgccttctgtaaaaaaaacgtaatgccgatacaaataaaaataaatcccaataatacacgtcgatccttcatctcttactcctccccatcatttcccaattcattatacagaaatggcaggaaaaaagaagggaattcccaaaatatacagacattttccttatttttctttcgggatttttttgcaaatcaatgcgcccataaaagcgaggctcacatacccaaacaccggataaacggtggaaatcagctgtccgtaaccgatttggctgataatgaaagcaaacgccaaaatgccgccgtaaatatatgtactttttatatgaagaaaactgtttaattgtttttccaatccgtataaattgccgataaccgacgtaaacacttccccgaaaataataaacaaataaatgatatgaagcgaacgcgaatacgaatagacaacttgagccatcggaatgtcaaactccagcacatccggcagcaccgataatgataaaaagctcgcggcaagcaccagtgtcaacagaacgccgcctatataagctccccttctgatcaccttctctgaagacatttcgttcgcaagcggcacaaggacggcttgggcgagcgataaatttaacgcgccgtaagagacggcggacaaaagccagttccacttgtcaggccatacccattcgtccgcgtttctcgtgcttgtaaatacaaatgaatcagctgtcacgataaaagagaaagaaattaaaagcggcaccaccaatatattgacgccgaacacacctttaacaccgcttgtcatgacggcaaaactcagtacgatcgtcagtaggatccccgcttgtgcgggccagccaagctgttcatgaaacagcgctccggctccggacagcatgacagaggtcactcccagcaatataaacatcataaacatgttcacggcgcggccgatggactggccgaataaatatgtgttcaattcctgataagatgctgcatgaatccgtttggaaataatcatgattttggcgcctaaatatgtaaacatcagaccgcttaccacgataccgaacagaccgatccagccaaacttcagaaaaaactcaacgatttcccgtcccgtggcaaaaccggctcctacaaccgtgcctacgtatacaaatgcaagctgacttgcagaaccttttgtttgtcccatttcaccctccggctaaacgcagatttgtccaggcctttatatatgcttatgagacaagtctcccgaaaagacgaacaaatcgtccttccccggaaaaaacagattcagctctctcctctaagcaaaaatattgaaagaaaaaaagggccggcgtatactcttcatcaagaaaggtcaaagcatttcatttcctttccgactatattggtcaaaaataatcaaacctcacgaatatcacttatcatgctgtaaacatttatttttcggggtttgaaacaaaatacttgaaagtcaaagaaggtcagagtatactaataatcaaagaaggtcaaagtttcgaccttattttctaacccatttggtcaaagatgatcaaatatttttcgaggaggttttggcaaatgcgttgtcaacattgtcagaaaaacgaggcgacgattcgcctgaacatgcaagtcaattccattcaaaaacaattcgttttatgtgaaacatgttatacagaattaacccgaaaaccgtctatgagcatggggccgcaatcattcggattcccgtttgagcaaggtttcgctcccaatcaaaataaacagcaggccggccctgaaaaaggcctgcttgacgagctcgctcaaaacgtcacaaacggcgcaaaagcaggtctgattgaccctgtgatcggccgcgataatgaagtggcgcgcgtaattgaaattttgaaccgccggaataaaaacaatccggtgctgatcggtgagccgggcgtcggtaaaacggctattgcagaaggcctcgcgcttaaaatcgctgaaggcgatgtgccgaacaagttgaaaaacaaagagctttacctgcttgacgtcgcttctctcgtcgccaatacagggatcagaggccagtttgaagaaagaatgaaacaattaatgaacgaattaaaagaacggaaaaatgtcatcttgttcattgatgagattcaccttcttgtaggtgccggctctgccgagggatcaatggatgccgggaacatcctgaaaccggcgcttgccagaggcgagctgcaggtcatcggggcgacaacgctgaaagagtaccgccagattgaaaaagatgcggcgcttgaaagacgcttccagcctgtcatggttcacgagcctacaatagaacaagccatcagcattctggaaggcattaaagataaatacgagaaataccacggcgtcacattcagcaatgaagcgataaacgcctgtgttacgctttcatcccgttacattcaggaccgccacctgccggataaagcgatcgacttattagatgaagccggctctaaggcgaacctggaacttgataccgtaaatgaagaagatgcggctgagagactcaatgcaattgacgcggagaaaacaaaagcgcttcaggaagaaaattatgagcttgccgcgaaactgcgtgatgaagaagcagctttggaaaagcagctggcgcatgaaacaccggcctcttcacctgaaatcggcgcggagcatattcaagccatcattgaacaaaaaacaggcattccggtcggaaaactccaggctgatgaacaagtcaaaatgaaggaacttgaagagcatcttcatcagcgtgtcatcggtcaggaaaaagccgtgaaaaaagtggcgaaagcagtcagacgaagccgcgccggtttaaaatccaaaaacagacctgtcggctccttcctctttgtcggaccgaccggagtcggaaaaaccgagttatcaaagacactcgcagatgaactgttcggtacaaaagattccattatccgtctcgatatgagtgaatacatggaaaaacacgccgtatcaaaaattatcggttcaccgccgggatatgtcggacacgatgaagccggtcaattaacggaaaaagtgcgccgcaatccgtacagcatcgtgctgctcgatgagattgaaaaagcccaccctgatgtccagcatatgtttctgcagattatggaggacggccgtctgacagacagccagggcagaacggtcagctttaaagataccgttttgattatgacaagcaacgctggaaccggcgaaaaacaggtgaaagtcggattccaatctgaagagagcgtcatggaagaacaaacgctgattgattcactgagcgcgttcttcaaaccggagtttttaaaccggtttgacagcattattgaattccaatccctgaaaaaagaacatctcgtgaaaatcgtcagcctgcttctcacagagcttgaagacacattaaaagagcgcggcatcagcctgagcgtcaccgatgatgcgaaggaaaaaatcgctgaaatcggctaccaccccgctttcggagcacgcccgctcagaagaaccatccaagaattgatcgaggacgaaatgacagatcttctattggatgacaacgaaatcaaagccttccatgtcgtaatggaagaggacggcatcaaagtccgggcacaataagaaaaaagcggttccctcctcgcggggagctgcttttttgtttctttctccatgccggaagggagaaactgtgaagaattcgggaacaatttttcaatcaccctaaagttccatgcactgccaccgatattaaccatagaaagctagtataaaggatttggtgaaaactatggataaaacatcgattatcggtatcatcctcgcagtgattgctttaagcgtgggcatggtgctgaaaggggtcagcttaagcgcactcgctaacccggcagctattctgattattttgttcggtacgatttctgcggtgatcatcgcattccccggaaaagaaatcaaaaaagtgcctgccctttttaaagtgctgtttaaagaaaacaaacagctgacaattgcgcaactaattcctatgttctctcaatgggcgcaaatcgccagacgtgaaggtctgctcgcattggaagcaagcattgaagacgtggatgacgcatttttaaaaaacggcctgagcatggcggttgacggacaaagcgcagaatttatcagagatattatgactgaagaagttgaagcgatggaagacagacaccaggccggcgcagccatctttacacaagccggcacatatgcgccgacactcggcgttttgggtgcggtcatcggccttatcgccgctctttccaacatgaacaataccgaggcgctcggacatgccatcagtgcggcgtttgtcgccacccttctcgggattttcacaggatatgtactatggcatcccttcgccaacaaactgaaacgcaaatcaaagcaggaagtcaaactgcgtgaaatcatgatcgaaggcgttctgtcagtgcttgaaggacaggccccgaaagtgatcgaacaaaaacttctcatgtatcttcctgcgaatgaacgcgcaaaagtcgctgaacaagaaggagaggcaaacaatggcgagaaaaaagaagaagaagcatgatgacgagcatgtggatgagtcttggctgatcccgtacgcggatttgctcacccttcttttggctctgttcattgtattgttcgccatgagctcggtcgatgcggcgaaattccaaatgctgtctaaatcatttaacgccgtgtttaccggaggcacgggtgttcttgaatattcaagcgtcacccctcctgaaaacgaaaaagacggcgttgatcagttaaaaaaagacaaggaaaaagataaagaacagaaaaagaaagaaagagaagcagccgaccgcgaagaacttgaaggcgtgcaaaagcaagtcaatcaatttataaaaaacaaaaagcttgaaactcagctggaaacaaagctgactaaagaaggactcttaattaccattaaagacagtatcttttttgattccggacgggcggacatccgtcaggaagatattccgcttgccaaggaaatctcgaatctccttgtgctgaatccgccgaggaatattatcatcagcggacatacggacaatgtgccgattaaaaactcacaatatcaatctaactggcatttaagcgtcatgcgggccgtcaacttcatggctattctcacggaaaacccgaaacttgacgcaaaagtattcagcgccaaaggtttcggagagtataaaccggccgtgtcgaacaaaaccgctgaagggcgcagcaaaaacaggcgcgtcgaggtattgatacagcctagaaacgccgcgactgaccaaaatcagtaatataaaaaaggaagcctttcaaacggcttccttttttatttctgatgaaaatgtttagcgtttaaccccactcttttcagcatttccgtacacatttctatctcttcatcactcagcacactgatcatttctttaatttcttcagcatgatcagggaaaatatcgtccaaaagacggattcccttttcggaaatttgtgcgaaagtcactcttctgtcagtcggcgaggcttttctgatgagaagttcttttttctctaatttgtcaacaacatatgtaatacttccgctcgctaataaaattttgtcgccgatctgctgaagcggctggttgcctttgtggtacagcagctcaagcaccgcaaattccgtcgggttcagaccgtgcttatgaatatgtttattcatatggtcgttaatagatcggtacgcacgtgacagtacaataaataatttcaatgagttttctgttttatccgtcatacattcaatcatccttttacaaaagaaaccgttacagagaaacattaataaacaaaatgaaaaatgtcaacaaaaatgtttccaaaatttctcttctttttgtctggccttaataaaataatttgtttttctatcattttggttattttttcttattaaagaagtataaaaatgatataatacctctattcaagtgtaatgttggagcgatgcagagtgaatacatttaaaggtgcccggggaaagatcaaactttatctcatattggtgatcatcccggcacttattatcagctttttcatttatgaaaaagaaaagcagaaaatagccgataaacacatacaggaagccagtatgatgctcaaccttcaccgcaataagctcaattatttaatcggtgaaacaaaagcccggatgacaacacttgcgatcgctgtcgataagcctgtcaatgaagaaaagatcattgatattctcgatcaggcttttgaggatgaacccagattcagcggtctgtatatgctgaattccaaaggtgatgtcatcgcaagcacgactgatctgaaatcaaaggtgaatttggccgaccgaccgtattttacgaaggcgaaaaagacgaaaaaaacggttatcacaaatgactactccagcagaattacaggccagcgcatcttcacgatctgcgtgccggtgttagacgcaaaacgggaagtcacggattatttagtagccgccattcaagtcgattatttgagaaatatgatcaatatgctgagccctgacgtttatgtcaaggcaaccaatcagaataaagtgatatttgccagcggacgggctgatcaatcagaaggggtgaaaccggtcagcggctatctggatgatattaattggaatatcaatgtttatccgaaaccggttgagctgaacgagctgaccaaaagcgtactgctgccgatgtccagtattgccgtgctgctgaatattctgttcatcctcgtccaatattatctgcttaagcgcaagacccagctggagcgcgctcaaaatgaagcgcagaaattggagctgatcggaacgcttgccgccagcaccgcccatgaaatccgcaacccgcttacagggatcagcggcttcattcagcttttgcagaaaaaatacaaatcggaggaagatcagctgtatttctcaattattgagcaggagattaaacggatcaatcagattgtcagtgagtttttagtgctcggtaaacccactgctgaacggttggaagtgaactcgctgcaggatattcttgatgagattatgccgattatttattctgaagggaatctgtataatgtggaagtgaatgtggagattctcgtcaatcggccgctcaaggtcaactgcacgaaagaccatattaaacaggtgattttaaatgtcgcaaaaaacgcgctggaatccatgcaggaaggcggccggctgtccatctatttagaagcccgcgaccataaagcagtcattaaggtggccgacaacggaatgggcatttctgaagatatgcttgaacacatttttcttccgtttgtaacgtcaaaggaaaaaggcaccggcctcggccttgtcgtatgtaaacgaatcatgctgatgtacggcggttcgattgacattcaaagcgaagtcgataagggcacagaggtcaccattacccttcctgccgcttcacgatgaaaaaaacaccctgggtcggggtgttttttatttaaagaagaatatgtgtaagaggatataccagaggaacggcatcatagccggcagatagtacgaggcgcttcgtgagccgtgccagcggaaaaatctgctgactgtacgcggtcatctttcggatgcggcgcttgatcaggaagcgcattcagtcttcgttatctgttttatcatcaatcatttgtttgcttcatatgcaggcatgacgtcaccgcgggagaacaagcctattttcttcacaaggccctgtattccttggtgatgtgtgcgatcacggtttaccagctgctgatacgcgttcatcagacagtccagttcctggctgtgcctgatcgtgtcatatccggtaaacccttgtctgttagccgcatctatcatcatttttctttttttatcaatagatacaagcaatttttcttgttcagaataactgcccattcacttcacccctcaccgctaaaagaataggaaacaagtttgattgggttattgagcattattacagattatactttatttgtaaacatttttttactaaataacttattttttcatttcatattggaatctttagcatgaatacgagaataatacccattcaggtaatgatataaacagaatgcggcatattcaagatttaaaaaacagccacagctgactttatattacaataaaaaacctctcataccggcgggggcatgagaggttcgggcgtctatcagttttgcacactttcattttcgtaaatcggcacccagccctcagtcgtcacgaaaattcggattgcgacgacccggcggtcttcctgaagcgtaaagtagtggcggatgttctccggaactgaaatcaaatcgcccggatttaaacggacgtcgaaaaatgtgccgtctttgccttgaatgacgaagatgccgtgtccgctgacgataaagcggacttcatcatccgtgtggtgatgttctctttggaaattttttaataattcatcaagattcggcgtggtatctgataaagaaatgacatcctgagactgatatccgcgccgggctgaaatgtcctgaatctccgtgtcaaacgccgcgagaatccgttctttttcatcttctgtcagattgtatttctccgaaagctcagacggaagtttttcaatgttccactgctcatagatcacctcttgttcgtctaaaaagcgcgctacttcttcctgattttcaatgagcgtattcttttcgtcatgtattctgatggtcgccattttccgttcctccttttattttacaagctgcggccgcagtgacagaagcttgaggtggcagctgaataaaaattcataggcttccagcacccttttcgcttcaaatgcggtccgcccccatgccgtaatgccgtgattacggattaacaccgcgcctgagccggcgtccgcatggtgcgcgaagttttcggccaatgccgggatgtgcgccgggttgtcaatgatcggaacggtcacggacgcgttttcctcccataatccgagcgccttaatcatctcctgcccctgaaacgtgatttgtttttcatccccgtaaagctctgagatgacattattattaacggtatggacatgcagacagcagccggcttctgtcttttggtataagtaagtatggagaagcgtttccgctgaaggttttaaagaatggccggtctcagcgggcttcccgttctcatcgattaagagaaaatcttcgtctgtttcttttcgtttgtcttttccgctcgccgtaacgaggaaagtcagcggcgcgtcggatactttgatggaaagattcccgctcgttgccgggaaccagtctctttcggccagctcgcgctttacctcggcaagttcgcgccagcgttcttcttttacagccacgcctgcacctccccgatgttttcaatgcctgttttcacctcatgaaaatcttgaaaaggcagatgccggaggccgagttctttgcattcagtcaaaagataatctctcgcaaaacacatatcggataactttgcagcctcaacatccgtgaccgaatcaccgatcataatgagaaatttctgctgatcggacagcttccggatgactgacggtttgcagcagccgcattgattggtgcagcctccgtcacaggcgtgcggccagtctatatgaatatattcattgtcaaaggatgcatgattgcagaaaatccgctccttttctacgatcccttccaaaagcggatgcacaaaaaagtccattcctccgcttacgatataaaacgggaggccgtttgaccggacaaacgagacaaaatccaaaaagccgtcccgtattttcgcatccttcagaataaagtctgtcagttcttcttttaagctgctcggcagcagtccgaacatccggccgactccttcttggattgataggcttttagacagaacaccgtcttttaattcaatccactcagggggcgcgaattctttcatcatgctgacaatgttgtcgttcatggtgaccgttccgtcgaaatcacaaataatcagcggtgtgcgggtcatacggcttccacccttccccatttgtctaatgcgagctgaagatctttgcacgacgcggctttttcttcaatcggctgcgcttcaagcaccgcatcaatgatggcgcggaacgctcttccgccgccctcggctcctttcggatggccgtgaatgcctccgccggcattgatgatgtgatcgatgccgaaatcgcgcatcaacaatggcaccataccgggatgaatgcctgccgacgggacggcaaacgacggatgaaagacatcgtcttttacacattcatcatggattgcaagcgcggactccttcggaagagcaacggatccgtaaggtgacggaaataaactgaaatcagcgccgcaatagcggttcagcttgccgagcaaaagcgcatgcgacaagccgtaaacgggagatgaagtgaacgcgccgctgactgccggatgcgccatgatcggaagcgggatttccctgtcttctgcaaggctctgcatcacatctaaaccgtaagcgaacacattcaataaaagcgcgtccgccccgagttctgccgcgcgcctcgctttatcccgcagttcagcggtccttcccgtaaggtttacggcatacagcgttttatgccccgtctcctcccgggtttccttcaggacttgttttccttcgataatgcgggtttcaaacggagccagttcattttcaaagaaaatttcgtcatctttaatcagatccacgcctccgagcgcctgctgtctgagctgttctttaatgtcggcgagattccgtccgatcacgcctttaaatatgctcatcagaagcggtctttcaaattcgcccagcagtttgcggatgccgtatataccgaatttcggcccgggaagggagcgtttaaacccttcggaaaattcaagatcagtcaattttatttttccgtccaatgacagctttccgaataccgtcgtcaggacggccggaatatctcttgaaaagttcgcctcgggataggcgatagtgatgacggattgtgtttcgttttctgaggttccttctttctcctcaacttttacgacccggcctttatgttttctgagctgttcctgcttcaccaggggcaggtcagtccaggagcctaccgtcagccccgccgcaatctgttccgcccgcttttcactgtccgttgtgtctgtcagaagatatgttgccaatacttcgctcatgcgtgaacgcctctctttctttcacaaaacataaaaaaacctcttccgtatgagcagaaagaggcttcgtgttatgtccgaatcttatctctcagctcctgctgcaagaattagcaccgtgctttatcagtcggttgccgggcttcatcgggctcgtccctctgcctgctcttgataagaataatgattttataaagtattttgaattatcgcattgttatccagatatgtcaatgctttttcgggtgaaaagattcagtttcccgatccgttccgcagcttctttaagtctttcttcacttgtcagaagaccgactcttatatagccttccccccattttccgaacccgtttccggcagcgacggcgacatccgctttctcgagcagcagatctgaaaacgactgtgacgtataaccgtcgggcacagggagccatgcaaaaaaggagccagccggagccgtcacatcccagccgataccgcggcaggcttcaatccatgcattgcgcctcgattcatatctgtcattttgcgctgcgacgcatgcctgatcctctaaaagagcggctgccgccgcctgctgcgccgcgggaaacaggctgacaaacatatgatcctgataaagattgatcgcttcgatgacagaagcgtttccgacggcaaatccgacccgccagcccgccatattatacgttttggacaaggtatagacttcgattcccgtctcctttgcgccttccgtctgcaaaaagctcagcggtttatgcccgtcaaagccgacggctccgtacgcgaaatcgtgaacgacacaaataccgttttgttccgcaaaaccgaccgtctcctcaaaaaacgcctctgtcgccacagcgccggtcggattattcggataattgagatacagcagcttcgcctcgctccgcaccttttcaggaattacgctgtaatcagggagaaaccctctttcttccgtcagcggcatcatttccattttcgctttcgcaagggcgacgcccgaccagtaatcaggatatccgggatcaggcaccagaatggtatctcccgggtttaaaagacattgcggaagctcaacaagtcccgccttgcctccgaacagcacggcgacttccgtgtccggatcaagcgtgaccccgtactccctttcataaaatgcagcggctgcttttttgaagctgtaagcgccccggaatgatgagtatttatgattttccggcctttcgacggcgcgcttcatttcttcaacgatatgctgaggcgtcggctgatcagggtttccctgccctaaattgatgacgtctctgccttctttcagcttttgatttactttttgcaccaatgatgcgaaaaattgttccggcagctgtttgagtacatctgagatttcaaagttcatatttttcaccttctaaaaatgtcttgaaatgatagtccatcatcatatatggttaaataaaaaaagtaaagagaaacttgaggtgttaaaaaatgaaatggaccgtttcctgtttgcaatttgatatttcatacggaaatccttcagaaaattttaaaaaagcggaatctttgattgagcaagaaagccgccatgcggatgtaatcgtgcttcctgagttgtggacgaccggctatgatctcacacggctagaccagctggcggatgaaaacggcaaagtttcggaacaatggcttaaagaaacggcaaaaacatacaacgtacacctcgttgccggatcttttgcggtcaaagaaggcgaaaatgtctataacaccatgtacatcgccgataacagcggacagatcgtgaagcggtatcagaaagcccatctgtttcagctgatggatgaacacctttacttgtcagcgggaaacagcgacggttcctttgagctcgacggtgtcaagtgcgccgggctgatctgctatgatatccgtttccccgaatggatcagaaagcatacgtcccagggcgcgaatgtcctgtttatctctgcggaatggcctctgccccgccttgatcattggcgaagcctgcttatcgccagagcaattgaaaaccaatgttttgtcgcagcctctaactgcacggggtccaatcccgataatgaatttgccggccacagcctgattattgacccgtggggccggattttagccgaaggagaccggacggaaggcgcagtccgggcggaaatcgatgtgtcagaaagcgcggccgtccgcggaaccattccggttttccaagacttgcggcgtgatttatattaattttcaaaaaaatgttgacaagaatatccggcacctgctaatattttcatcaactgattaatccgaattgtgatacaaatcaatatattttctcttatcgagagttgggcgagggaattggccttttgaccccaacagcaaccgaccgtaattccattgtgaaatggggcgcgtacattttgcgccgagacgattgtctcataaggcacggtgctaattccatcagatgttatctgagagataagaggcggactgcactgtttcagcctccttctctttcagagaaggaggctttttttcgggcgtattctccgtcacgatctcttactgccactacataattggagggtaaatccatgtcagcaactaaaacaagtctttatgaacaattaacagaaagctccgccgccgcgttagccgtcaagctcggcttattccaaagcaaaagcactctgacatgccgtgaaatcggcgacggcaatttaaattacgtctttcatgtttacgataaagaaaaccaaaaaggactgattatcaaacaggcgattccttacgcgaaagtcgtcggtgaaagctggccgcttacaattgatcgggcgagaatcgaaagcagcgccctcatccgccagggcgaacacgtgccgcacctcgttccggccgtttactattccgatactgaaatggccgtcacggtaatggaagacctctcacatttgcagatttcaagaaaagggctgctggaagggcagcattatccgaacttatcggttcatatcggtgaatttttagggaaaacgcttttttactcatccgattatgcgcttgatgcgaaagtaaagcagcagctcgcaaagcagtttacaaatcctgagctttgcaatattacagaaaggcttgtgtttacagaaccgtttctcgaccatgagaccaacgattttgaagaggagctgcgcccgtacgcagaaaaagtttggaacaattcccggctgaaagaaggcgctgacgaattgaaagccatctttctgaattccgcggaaacattggttcacggcgatctgcacacgggaagcatcttcgccgatgaacatgaaacaaaggtgattgatcccgagtttgctttcttcggaccgatcgggtttgacatcggccaatttatcgccaatctgctgttaaacgccctcagccgcgacggtgacgacagacagccgttatatgaccatactgccgccgtatgggatacatttgtgaaaacattcagtgaagcatgggagaaagactgcctgccttcccacagacacctgctggaagacacactgaaaaacgcgtttgaggaagcggtcggttttgcgggatgcgaattgatccggcgcacgatcggactcgcccatgtggctgacttagatgaaatcactccgtttgacaaacgaatcgaacggaagaagctggcgcttgagatcggcgcctattatatcgaaaacagaaaagaactgaagcatatcaccgaagttctggaccaatttaagctccgtgtaaaggaatgatgcagcatgaccaatgaatttgccatcccccgttccgtggaatggaaagaaacctacatccgcattttaaatcagcaaaaacttcccgacgtcactgagtatgtggaacttgaaacaaaggaagatgtattcgacgcgattgtcacgctgaaagtaaggggcgccccggccatcggtataaccgcggcattcggactcgcgctctccgccaagtcatttgaagcccgcgacctttcagatttccgacgtcagttcgcggatgtcaaagcgtatttaaacagttcgaggcccactgccgtcaacctcgcgtgggcgcttgacagactgacggattccatcagggatgcaatctcaatcaatgaagcgaaaacaacgctcgttcatgaagctattcaaattcagattgaggatgaagaaacctgccgaatgatcggccaaaatgcgctgcacctttttaaaaaaggcgaccagatcatgaccatctgcaatgcgggctcgattgctacaagccggtacggtacggcgcttgctcccttttacttagcgaaacaaaaagacctcggccttcatatctacgcatgtgaaacaagacccgttctccagggatcccggctgacggcgtgggagctgatgcagggcggaattgatgtcacactcattacggacagcatggccgcccatacaatgaaggaaaaacatatatcagcagtcattgtcggcgctgacagaattgctaaaaacggagatacggccaacaaaatcggaacttacggcctcgctattttggcaaacgcctttcagattccgttttttgtggccgcaccgctttcgacctttgacttgcagattgaaaacggcgatcagattccgattgaagaaagagatccggatgaagtcagacagatctcaggcatacgcaccgctcccgaagatgtgccggtcttcaatccggcctttgacatcacaccgggcagcctgatttcaggcattatcaccgagaaaggaattgtgaccggttcttacacggaagaaattgaacaattattcgcagactgtcagctgagctgaaaaaccgctgatgatgttgcctcgggcaatgtcagcggtttttttgtctgcacaatgtaatcacttcatctttttgggcggctgtaatgagatgcattttaaaaaacagctctgcataaccggctatcttttgcggacggctcattttcatcaggcttcgtcctcctttttcaccagaccaacttttttcacttaataaaatgatatgtcggacgcaaaaaaacggaacgtgccatatgttttatttttctttataggatatttgttcgatgttcagcagcaccgcttttacatccgtcttcgtgcccgcgtatcccgttaaggcgctgtttttgccgattacccgatggcacgggacaaaaatcggcagccggtttcgtttattggcttgtccgatggcgcgcaccgctttcggttttccgatcgcttcggccatatcgccgtagcttcgggattccccgtaaggaatcatcgtcagcgcgttccataccctttcctgaaagggtgtgcctttttgtctcaaaggcagagagaattgctttctttctcctgaaaaataggatgccagctgctgtttcgcctccgacagcaaagcggtttcgcacggctttacgccgggcgcgtctttccgccattcctcaaaatcttccccggtgagaaacaggccggtaataaagccctcttcctctgttacgataacggttccaaacggcgcttttacacttgtaaaacagatcattccccgctccttctttcttcggtattctgccggatcggaagcgtcaaatgaaaaaccgtgcccttcccttcttcactttccacatgaatgcgtccctgatgttcttcgatgattttatagctgaccatcagaccgaggcccgttcccctgtcttttgtcgtgtaaaatggctcgcccagacgttttaatttgtcttcggaaatgcctgttccttcatcttgaaaagaaatcaaaatgtggtcttgatcagaaggctggatggtcacgtagatattgccgccgcccggcatgacttcaatggcgttttttaaaatattgataaacacctgttttaattgattcggttcacagtaaatcggcgggatgtttccggtcaggttcagatgaatctgcacattgacaagattggcctgggcattcaaaagatcagccgtgtctttcagaatctgcgtcacgtctttttcttcatataatatcgcctgaggtttcgctaaaattaaaaattcagtgatgatagactcgatgcgttttaattctgaggtaatgacgttaaagtacagggaatattcgccttcaatgcttccttgaagaagctgaatgaaccctttcagcgctgtcatcgggtttctgatttcgtgggcgatgcccgccgccagctcccctacaacatgaagagtgtcggatttccgcagcctctcttcaagttctttggcctctgtgacatctttaaagatggccagattcatattttgaatgatatttcttttgaaggagaattccagtttgcggctgtcactgctgcttaacaggaaggggatttcattatccattccttctaaatcaatctttctggcgggaacacccgcgttttcaatatcaaataaagaaagaatatccggaacggtgtacgctctcagctcctcatccggcatgccgagtatacggcttgcgagaggattcgcgtcaataatgcggaattggttgtcaaataagaccttgccgtccattgagccgttgaatacttttctgaatttcagctcgctttcccgcaattctttttccatccgcttacgatcgctgacatttcttaaaatggttaaatgctgaccttcaagtatggttcgttttgatgtaaactcaagctctttgtattggccgttcgccatctgaaacagcatttcttcacggatttccccgtatttttcatatttcttcttaatctgcttgtattttttctgcggatcaacgataaacgtacataaattcgtctccagcagcttatccatcggcagttcgaaaatgcggcacgccgattcgtttgctttggcaatctttccgtcatcagaccaaatgacaatcgcgtccatcgcgttttcaaaaatttcgcggaatcgctcttcgcttttaaagagtttcaattccatcaaccgtttctctgttatatctctcataatggacatgtagaacccgctgattaagttggacgtaatcgtaaattcaaacagcttctcttcgccggaccgaagcttgacgggcagttctcctttggcatttccttttctgcggagggtttcccagatttctttcagatgctttttgttttcgccgtcggtaaaatggcggagcgacagatgggacaattcattctggccgatctcaaagcttttgcaaaaagagaggttcgcatcaataaacccgccgtccttatcaaacagcacgatgccgtcgacagccctgtcaaacaaatctttaaacagctgctcgttcatggagaattcgcgctctaatatttttttagaggagatgtccctcatcaccacaaaaaaataatcctccccaattccgtctctggcgaggaattcaatgtatttcgtcgcgccgctgtcaagcttaatcggcacctctttccacagatggcctttttttaaaaactttttcacggccttattcagttcttcctgaggcacggaatataaaaagtccaggacggagcggttaataaggctctctgcctcaatctgcatcatccgggccgcagcctcgttcgcctggacgattttcatttccttacggcatataaaaatggcatcaagcgtgttattcataatcacatgataccggttcaaatcactcttcaggcggtcattttcctctttcatccgcttcagctgctctttcagcgactcgtttgtttgcaaatccagagtttcagccattcagtacactccttcttcaaaaacctatccttcaatatttctacaaaatacctcatcttccttcattcgccctatacatttcagaaaatttcaatgatatgacaagttaaagtctttttctacgatccttacctccccgttacatcatcctaacaatcccttttgtcctccttcaattttttgttttttattttaaaatgaacaccaacaggaaataatcatgcagtggatgatttttgaagagaaggtgatgctatgacaaaatcgcgagacagttactttgacaacgccaagtttatcttgatttttctggtggtgttcggccatatcctccggtcatttattaacggaaatgagtttatgctccatctctacaaattcatttatacttttcatatgccggcctttatcctggtttccggctatttcgcaaaaaactttaagcggaaaggttatgtgaagaagctggctgtgaagctgattattccgtacctgatttttcagggcatttactcggttttttactatttgattcaggatgaaagcatggcaagcgtcaatccgattgatccgcagtggtctctctggtttttagtcagcttattcttttggaatctgctgctttatccctttacgaagctgccgaaaatgtgggcgcttggggcgagctgcgggcttgccgtcatgatcgggtatctcgatttcatcagcagcacgctgagtctttcacggacgtttgtctttcttccgatgtttctcgtcgggttttatttaaagaaacggcactttgatttgcttcgggctaaaagaggcaggcagattgccgcgggcgtactggggattgttttcctcttatgctggtgcattgattttgattactcgtggctgttcggatcggagccttattctacattcggcacagtgtcgctgttgagcggtctgtcgcgcatcggctggtatgttttggcctttgccgccactttcagctttttggcgctcgttccgcaaaagcgttatttctttacgaaatggggtacgagaacgttttacgtgtatctgctgcatggattcattataaaaacgctgcggcagatcgggcttgaagatcacttgtctgattatcagaatttagtcatgctcttaatgttaacggccgctcttacgtccattctctccagcaatgcggtgaaaacggccgcacagccgtttattgagctgcggataaccggcttgcttcaagcggtgaaaggaacaagaaacggtgcttattcgaaataatgcaaaatacctcttaagcgttgccgcttaagaggtattttttattttttgccgtcttcttttttcttcggcttcgtctgttcaagcgtttcaatccattttccggcgttataatcaccgagctcgcttgaaaactcttcttcaagcaatttagggtccatcggctttttatggttttgcatgtctttgctgtggcggttttttttcgtcatattactcgcctccttgtttgccgtgttttgatttgcggtttgcgcctctcagtccgggatcaccgtcatattgtgttttgtatgcatctttgtccatgctctcagtcggtgtattgttgttggtcaaagcttcattctttgctgctttgcgtttcatttgatttcctccttctgtcagcaaatctgttttgaattcattaagcattttttttaagtcgcgcactgtcacgtttttggcctcatcaatgagttcatagccgatctgtccgttcggctcaagcagcacatatttaaaatcttgaatgtctccgaggccttcctgcctgatcctcattgacagctggtcttcggtaaaacgcattttttttaagttttccgggatgatttttccgtttctgacaacggcgacggtttttcctgaaaatagaaactcaaaaaagcttgatttgatttctaaatattccatcagaatcagtaccgcaataaaaatcgccgccgcgaaaatggtttcccataaattatgttcaataaacggctgaataataatcgagccgatcgaaatcatgatgactgtctgggtcaccgacagctggctgatggatttccgtccggcaatccgcaataaaaaggtaccgaccgcgatcataactaccgacttccaaaatacggcaaacaatgacgtcacctctttacaagtagaatctccaaagaaactgtttccactcatccattttacggcaataaaaaaacaccgctttctgaaaagcggtgtcagccgataatcatcctttccttcggataatgataatttgcttcgatttcttttcggccgatcaaataaaggaaagtcaaaatgccgatccggccgataaacatcacaatcatgatcacacattttccgatatcgcttaaatgcggagtaatcccgagcgacaggccggtcgttccgaaagcggaacacacttcaaaaagcagtccgaggagcgtctgatttgtctccgtcacggaaagaatcagcgtcgacccgaacacgagcagaatcgccatcatcgtaacgaccagcgacttcatgacatcagcctgatgaagctcgcgtttaaagaccttgaccgctttattccctctggcaaaatgaaacagagcaagaaggttaagcgcaaacgtcgtcgtacggattccgccgccgaccgagctcggtgatgcgccgataaacatgagggcgcagatgaaaaataatgtcggcgccgacagctggctgatatcaattgtcgcaagcccgccgcttcgcgtagcagttgattgaaagagacataaaaataaaacatcatgccagcttttccccttcataacatggcttgcttcaagcgcgtaaatgcccacggctccgaacaaaacgagcattccgaacgtaacggtcgtaattttcgtaaacagcgtgaatgagtatctgcgctgttttgaaaacaaaaagtcttttacttctacgagcaccggaaaaccgatcgcaccgaaaataatcagaagcatcgtaataaactgcacgaaatagtcatgtctgaacgggacgagtgaatttcccgtaatatcaaagccgccgtttgtcgtggcgctgacgctcgcaaagaatccgtgcaagtacgcctgttcaaacgaatcatagtatgttaaaaaatatgttcctaagatgatgccgcctaaaaactcgattaataaaatcaaaaacagcacttgcttcatcaggttgacgataccggaaaactgcgattgattctgatccaccataatgagcttccgttcccgcagaccgatccgtttgcccataatgagccagacgaatgttccgagcgtcataatgccgattccgccgaattgaagcacgaaagccaaaatgacaatcccggccgtgctgaatgtatcagccgtgttgacgaccgttaaaccggtgacactgactgagctgacagccgtaaacagcgcgtctataaacgaccagctggccccttgtttgtgggcggccggcagacttagcaaaataaatgccaccgtcacagcaagaaaatagtataatgcaatcagctgtgcaggcgacaagatctgtatgaatttcttcagttttaatttcataagatagttccttctgcctctcaaatgtagtacgtaattattctaatgatattgggagaatttttaaaggccttttttgaaagatttttcattaccttatgtaatttgccgatctttaaacaaaaaacctctgaaacgattgtcagaggttttgtttattattttgcttccagcctgcggatgcgctcatcgagatcagggtgtgtggagaacagtgacgaatgctttttgccgttaatttttaacgtctgcaccgccgtctggtcttcttcattcacatgtcctgtataagacttcagcgtacgcagggcgtgaatcattttatccttgccggcaaggtctgcaccgccgcggtcagcgtgaaactctctgtggcgcgagtaggcgaagacgacaagactgccgagaatggaaaagataatctgaaacacgatcatcgcgataaaatgcacgaccggtgcgaggtcttctttgacaaagcggcttgcaacccatgccgcgattcgggaaaggaatacgacgaacgtattgacgattccctgcagcagcgtcatcgtgaccatatcaccgtttgtgatgtgtgcgacttcatgggcaagaaccccttccaccgcagcatcatccatctgctgcaataaacctgaagaaaccgcgacaagcgaacggcgcttagaaggtccggtcgcaaaagcattgacctccggggactgataaatgccgacttcaggcattttcgtcatccctgcggcacgggacaatctgtgcacacggtcaaccaattgctgttcttcatagctgagtgactgtttcttcggatttaacacccggacgcccatcatcgttttggccatccatctggacattccgagagaaataaaagaaccgacaaaaccgacgacaagactgaacacgagcaatgccatcagatcaatgcggccattttgtatatacgagccgacaccggtaacgcttgtaataatcgtaagcacaattccgattgtcgtaatgaccaaaaggttcgttaaaataaacagaaatattcttttcgccataattacctccgtcttttttaagatcaaaagaacttatttaattaaattataaatgatctgtttgaaaatgcaacaatttcgacgtatgatgtaaatgtaattctcagtgatatcagaaagtgaacacgtaatcaatcagaggtgaaccatgaacacgtttaaactgacccgaactgatatggtccggcttctttacgcgttaaaaggccaaggagacgcaactcctctccaaatcttattgcaatcagcggaaatgacattggatgaagcggaaagccgtctgcatatccctgaatttctgacgagattcgaacgaaaaaaagagaaaaaggaatacgggctttcaactaacgagattgtcgagctgggaaatctgtgcgagctgacgtctttaaaatcaaccgccgtccaaaactgggtgaagcgcgatattaaagatttaatcggccaccccttactcggcaaaaaatatacaattgaacaagctgtcatccttctcattgtacgtgatttaaaatcaatttatgacttcgaacatatacgcggcatattaaaaatcgcttttaacacgatcacagacagatcagacgacgtcatcagcccgatcagctactatgaaagctgcgcccaagtgattgattatcttcatcataaagcaaacccgccgatgaaggaaacgagcctgcaggagctcgtcgaagagcagacggacaagctcaaaggctgctttaaagaactcggaagcggacaatggaacgatatcagatccatcatcgccgtcacggtgctctccgttttgactttccatattcaagcctcagcctacaaaatgaccagccatttattataattcataacgcttcttcgccccggtgtctgcgccggggttttttgctgtacaacaattgccagcataatcaataccgttccgtttgaaactaaaatgcgtaaacacatcttgccagagaaaaggagatgaaaaagatggcgagcagaaataaactcttagttccaggggctgagcaggcacttgaccaatttaaatacgaagtggctcaagaattcggcgtgaaccttagctctgatacagcagcacgcgcaaacggctctgtaggcggggaaatgacaaaacgtcttgtacagcaggctcaatcacaattaaacgggaaaaatcaataatgcagcttattcgccgggacttctcggcgaattttgatatttatcggcattctcctttccgtgccggtagccgttcggattcctgcggtctgacgaatcttcatgatgccgataggagtcccaatgttcattgcgatcatgattccgctgattccagtaatgattgtaatacttttgcttaggctctttgtcatttccgttttcctgaggattttgtgttgggggctgctctgtttccccatcttgttccttctgtgtgttttcttctgatccggaagctgcatttttgtcggtttgctgactgccgtcctgactgtccggcttcgcttcttccgtgccgggcgttgtttcattgttttccggcttctctgctgccttttcttcatcaggagctgtcttttcatcagccgccggcttttctgtgtccggctgtttgctttgatcagcgtctgtttcggtatctttttgatctgtttcattgccgtcggtttgcttttcagactgtttttcttctgttttcttttcgtttcttcttatgtagctgcctgttgacatcccttcctgttttgctttttctcttgtttccatatcagattcaagagattggacctggtaggtgcccttatatttttcagtcatgtcagccagctgttttttaacgccttttttatatgtattgtcatctgtattttcataaaccgtggaaattaaaatctcttttgattcctttacatatccatgcttgctgcaatcggtaataatattattgatgacttccttaaaatcgctgcttttccaatctccgatgtcactgatgacctgtttggcgtcatggttcagcggtgtcagttcaatgacttcatatttgctgtttaaagccatttcaatgctgggattaatgtcaagcgtcatatacgcgtaagctttgttatcagaaaaaaccgggagcaaaattaaaataaacaaaataatagcagtcatcgtaaacactcccaatttaaaagggcgcagtttcagaaaatcaaaaaagctggcccttcttcccatacgcgtttcgccttcgaacgtaatttcctctccgatttcacaagtgcggtgatcattttttgtttttaaaaattgtccgtcaggggttagcaacgtgacgaattttttatttttctctactatgatccctcttctcatgagtgcaacacccctttaagataatcttttaaataaatataatcaccggtaataataatactcatggcgatgatatattttcggttccgttcaatcgtttttctgctgaccgacacaagctgctccagctgtttgacaggaagctgttttttctggtgcaaaatggacgccagctcttcattttcaacaagcgtgtaggctaccttaatcgcattctgcctcgcatcagtatgcttcggcgattgttccagcagctctttaaaagacaggccgtattctttcagctgcttctgaaaaaaaagaatttcttcccggcgctgttcctgttctatctgtttgcggtattcatcaatggaaagctccgcttcgataaggctctgcgaagattcctggtcgtcgccctcctgcacatccatattgatatgctgagcggttcttgcttcttttctgatatagtctatcacttttctttttataatcagctctgcaaatgcaagcagcgaattacctttttcagccgaatacttttcaatagcttcgttaaacgcgatcagcccgatgctgaattcgtcgtctttttcatctatatatcgtttacaaacggatgaaaccgtcttcgcgataaaaggcttatattgctgtattaaatcgttctgcagatctttgtcgcctttttgtattttttcaacagatgtttcaagcgtttgcttcttttttcccaatttaaacaaaaggctaagcactggtttcacctcagttcctccctataactactcataatcatagctaatttagtagggattcgcaaaggaagaaaaagagaaatcgatttcatttgtctcaattatgacaagccaataagacgtactatacatgatttcgtgcccccatgcagaattaagggggttttctctgtgttttttgtaacaatgctgttataaaattgttatcatatgtcttaaatgtaagcgcttcaaacaaaaaagggaacctgctttctaaaaagccagactccctttttgatcattttacgcgtgttctcttttttccgatgccgcgccggactctgtttgttttgctcctgacataaaccatccgcaaaccgcaatggcagccagaaccgcccagaaaatgattttccaggccgccgaatggatgacatctgccggaattataccgagttcctcatgggccaacgtataaagagcgagcttcacgcctacccatccgacaatcacaaatgccgccgtttcaaggcccggcctggttttcagtaaggatacgaacattgatgccgcaaaacgcataatgattaaaccgattacgccgccggctaaaataacgagaaactgaccgccgtccaagccgccgatggcaggaagccgtgttcccggaagcgttacggcaagtgcgaccgccgctaaaatggagtcaacggcaaaagcgatgtccgcgagctccactttcaagacagtctgccaaaacccgctttctttctgcgttttctgcccggcgttatctttgaatacataccgcttcagcaaatggctgaccgcaatgtaaaacaggtataaagcgccgacggcctggacctgccaaacattcaccagaaatgaaatggcgaacagcgacccgaaacgcaaaataaatgcgcccgccaatccgtaaaataaagccttcttcctttgtttttcaggaagatgcttcaccatcacagccatcaccagcgcgttatccgccgccaaaatcccttccagcccgattaaaacgagaagaacccatccatactccaataataatgcaaagtccaatccattccctccgtttcttttttctatcatccgagcttataccggcggtttttttacgcaaaaaagacctttgccgatataaggcaaaggtcttgctagacatgaatgattggcatgccaacaaagtcgatggatatgatccatgaattgacgactttgtttccggaatatccggacgctactcccctttgggatttcaagaaatatttgtttatacgctcatgataaagcctgtttcatcatttgtcaacgcttaacttttttaacaaattgagaaattttttctgttttgacccgctgttttcttctcttcaaaaacatccaaagaacgagaagcaacacaatgaatataccgagcggcagcatatattgatcgagaatggaaccgacgcttttccaattttccccgagtttcataccgaggtatacgtaagcaaatgtaatcggcagcatcgctgcatatgtatagagagagaacacccagatattcatcttcgcaatgccgcacggcaaagaaatcagcgtcctgacccccggtataaaacggccgctgaacgctaccaaacctccgtgcttctgaaagaaatcatctgatttctgcagaaattcgggttttatccatatgtactttccatatttcagcaaaaacggccgaccgcccagcctgccgatcccatataagacaagcggacctgaaacaccgccgagcgaaccggcaaacacggctccggcaagcgtcatatccccttttgagacccaatagcccgcaagcggaagaacaatttccgccgggatgaattctatactgagcgccaaaaaaattccggcgtaagataagcttttaaacgcttcaattattgatatgatgaaatcttcgatgatctatcactcccggcttacgtctatattctgaaacttaagaatgattttaacacaaaaccttgaggctgaaatatcttttagacatgcccgttataaatatagtcgtttcagatcggtatagcgggagggaatgacatgcgcaatacaacgtcccgcctgtctcctgaatgctcgtctggcggcggttacatcacttaagatctccggaaagttaccatttgcggtaagcggcgctgaccggaattcagttcatatgggcagtgcgttttgccgggatctttgccatcgccgaatctgtttttatgggagcgggaaattctctcggtcactacatggaaatgcgtgggcatttcccggggaatgattctgtataatttttttgatcaaccattgatgattttcggggacttcagcgatttaaagaacttaccgattcacatgcgatttccttttcagccggctattaccgcatgaggaaatagaatagccgctccatgaacgccgcatcacccataagttgctacacatggaacggacccgtttatccacaataaagacaaaaaggagtttttattcatgcacacgatgtggaagggttcgatcagtttcggcctcgtcaatatcccggtcaagctctttgcggccactgaagataaagatataaaattccgcagtcttcataaagaagaccatgcgccgattaaatacgaaaaaatctgcaccggatgtgaaaagagtctggagcctgatgaaatcgtgaaaggctatgagtatgtaaaagggaaatacgtcattatgacagacgaagacttgaaagacgtaaaacaggaacatgaagaaaaagcggttgagattgttgactttgtccagctgcaggaaatcgatccgatttattttaaccggtcatattatgtcgggccgggagacaacggcacaaaagcctatacacttctgcgggaagcgctgaggacgacgggtaaaatcgggattgcctccattacgatccgctctaaacagcagcttgcgattcttcgcgtgtatgacaactgcatcgtgatggaatccattcattatccggatgaggtcagaaatgccggacatgtgccgggcgttcctgagcagacagccgttaatgaaaaagagctgcagacggcgatcacattaattaatgagctgacaaccgagtttgacccggaacaatacgaagacacatgccggaaagcccttctcgccaaaattaacgataagctcgaacatgaagaagcgggcgtgacacctgctcctgccggcccgcgagaagatgtcattgatcttgtcagcgcgcttcaggcaagcattgaccggacgaagcggccgaatcgcgaacaggctgcaccggcacggacaaaagacacagcgtcagctggcggcggaggcaaaaagcagaagacgaccagacaaaaagccggaacgtcttaatcatggtgctgacgatgcagccgattttgacctctgtaccgcctgaaggcagtgagtggcgctatgaggtaaaatatgacggattccgctgtcttctccgcatagacgaaaacggtgttacattaaccagcagaaacggacagacgctgacgaatcaatttccggaaatcacggcttttgcggcccggtgttttcagcacatgaaagacaggttccccattacgcttgacggagagcttgtctatttaatcaatccgtacagagcggactttgagcatcttcaaatccgcggacgtttaaaacgaaccgaagcaattaaaagcaccgctgatagacggccgtgccgctttctggcatttgatctcctcgttctggaaggcgcgggcaccgtctcattaccgtatgtgaaacggaagcgcgccctttccaatctgcttaaagaagcaaatcttcccgcctgccctcatcacttagcggaagaagcgattcaatacattccggagcacactgactttgacgcgctttgggacaaggtcgtccgccatgacggagaaggtatcgtagccaaaaggacttccagcggatgggcggaaaataaacgctctcccgactggcagaagtataaacatatgaaaacggctcacgtgctattaaccggattcaatccgaagaacgggtatgtgacggcctctgttttgaaagacggcatcgtcgtcccgatcgcttccgtttcccacggcatgcaggcggaagaaaaaaacgccgtcagaaccattatggagacccacggaaaaaaacaaaaaagcggcgagtatacacttgagccttctatctgcatgaccgtgcagtatttaaccatattgcaggacacgctgcgtgaagtatcttttgtgtcctttcagtttgaaatggattggacggaatgcacgtatcagcagcttatcctccgctctaaaacgctgccgccgaagctgcagttcacaagcctggataagatcgtttttaaaaaacgtgaaaaaacgaaagcagatttccttagttatatggtgaaaatgagcgattttctgatgccctttcttaaagatcgggccgtcacggtgatccgttatccgcacggcgcgcctggcgaatctttctttcaaaaaaacaaaccggactacacgccggactttgtcacaagcgtgtttgacgggagccacgagcacatcgtatgcagcagcgtaccgtcacttctatggctggctaatcagctggcgcttgaatttcacgttccgtttcagacagtgcattctgaaaggcccgcagaaatcgtcattgatcttgatcctccgtcaaggaatgattttcctatggcagtggaggctgcgcatgtgctgaaacagctgtttgactcattcagcatgacgtcattcccgaagctctccggaaataaaggcattcagctttacatcccgctttcaccggaagcattcacctatgaagaaacccgtgcgttcacaatgctcatcgccgattattgcgtcaggacgcgcccggatctttttacgacagagcggtttatcaaaaaccgaaacggcaggctctacctagattatttgcagcatgccgaagggaaaaccattatcgccccctattcgacccggggcaacgaattgggaacggttgcggctcccctttattggagcgaagtcaactcctctttaacacctgatgattatacgatcgatacagtagtgaaccgcgtcaggacagagggagatccgttttatgatttttaccggaatccgcaggacggcccgctttcaatcgtgcttgagcaaatcaagagaaagagctgacgcttttggtcagctcttttcagtctgatacgtgcacatcaatttttctttggaaataaataaatagcaggagtaaggaatgtttttgagggtgagctgttttgcagtaaagtataaaatcggaagatgggccgctttcttaaacagcctgtagcagccgctggacggttttatcacatcaaaaccgagtctcgccgctcctttatgaagcattgtaatgccgacgactcccttaatctcgtctttccgtttatgctggttaatataatccgctaaatgaggcatggattgatataccttctgatatagcataatcccccttctgaccgcgctttcaataggctgcagctctttcaggagtttgacattatgaagatgaatcttaactaacacgtcgttttttttaatcctggttccgtcgctcaggatgacatcttttcctttatatctagtcaaacggacgcggaatacattcgattgccgtttatcaatcagcgtcagccgggtaaagaagaaataaagcggatcaagtaagtaccatatagacagcagacagcttctcacatgttcaccttctttatattcaaagcaccctcatattttggcatgaggcatgacacattatgattggtaaataatgatgcagccctgtatcagcttatgcaaaaaccgcttcaggctctactgtccgaaacagaaaaaaacactcttcatgaagaagagtgtctgtatccgctttcttttaacggaaaagcaaatgctggctgtgaattcctgcttttttcagtaaggctatcagctgttcctgttcctcaggcataagtcctgaaaacgctctcgcaattctcaatgaatgaatcggataaattttatccaaatactcgtttcctttatcagttaaatgggcgtaaacagaccgtttgtccttcgggtcttgttctctgaccaaaaacccgtttctttcaagcttgtcgatgacataggtgacattcccgctgacaagcaaaagacgcgacccgatttgctgaagcttttgcggtcctctcgtatagagcagctccaaaacggcaaattcagtcggattaaaaccgtgttctttactatcgcggatgctgtgttcagacacactcttgaaagcccttgcaaaaactttgtacaaattcatcgaacgcatcacttcttcttcgttaaatgataatctcatcatatctaccccgtatttaagatttttataaaaaaataatgtaaacccttacaattcataagagtcgttctttgttttatattctattcgtgccgtttttcagaattccttcttttttatataaaaaaatacccttatacatcatttaatttgtataagggttccgttctttatagggaatgttccgaaaaaaatacgcgtattcctttctcagctccgtaattgtcatggaattaagtatttctttcgtatagactccgatctgcagaagctttttggaataatggtttctctctttatccaatgcattttgaagcaaacgactcatgacggcctcctttgttttccgttattctatgatcagaataacgcttttatatcaaagatgtataaagccattgtaaaacttctgtagattatgatgtttttcggtaaagaccgttctggacggctctgagcagcggaaaagcgtgttccccggcaagctgcatgaacgcctccagcatttcatcgcgtttcatatctaattcaatgatttcttttgccagcgaaaccgctttttctttctccattcctatccttcctcctcattgtatctgtacaataagcataaaacgggggcacagaaccatgcattaaccttgtcaatttttctgccgctttttttctaaaattttctattccgcgtcagaaaacctgacaagcgtcaggttttttctctttttttcttatataatatgagtaaaagacatccaggggtggaaaaatgacgacagacgaacaatcttacaaagataaaaaagtaatctcgatcggcattgtaagcgaattaaccggattgtcagtcagacagatcagatactatgaagaacggaaattaatctacccgcagcgatcatcacggggaacgagaaagtattccttcgcggacgttgagcggctgatggatattgccaacaagcgggaagacggcgtgcagacggctgagattttaaaagacatgcggaaaaaagaacaggctctcaaaaacgacccgcagctccgcaaaaaaatgctggaaggacagcttaatgctcattttaagtataaaaaccgctgatcaaaaaagtccgcctcctgtgagacggactttttttataaagcatgaagaaatgcagttgcaatgccgaaataaattaataaggacaaaatatcgttcagcgtcgtaatcagcggtcctgacgcaatcgccgggtcaatgttcagtttatgaagaataatagggacgatcgttccggccatcgtaccgataatcaacgttgcaagcagcgatgaaccgacgacaaaaccgagcgttaagtctttctgccagacggttgcgacgatcgtaatcgcgatcgcacagacgatgccgatgtagataccggttcttaattcacggaaaatcagtttaaagatggtttttttattcatttcttctttagccagtcctctgatgacgacggcaagtgactgtgtgcctgtattacccgtcgttcccgcgatcatcggcatgaaaaacgcgagggcgactactttttgcaatgtatcttcaaaataattcagaatgcttccggaaatcaatccgataaacaaaagcagaatgagccacggcaaacggcggtacgccgccacgtatgctttcgtatcaaatgtaatcgccttaccggaggctgcgaatttttcgtaatcttcatcggcttctttaatcacgacgtcaataatatcatcgacagtgacaataccgacaagcacattattttcttccacgatgggaatggctaaaaagtcataccgctggatcagccgggcgacttcttcctggtcttggagcaccccggccgagatgacacgcgtaaacatgagatcctgcactttatcgtcaggctcgccgagaattaaatctctgtaagagagcactccgacaagctgcttgctgtcattaatcacgtacaaataatttattgattctgcgatttctgcaaagcttttcagcttcacgaccgcatcttttactgtataatgctgcggaatccagacgaagcggttcgtcatcatccggcccgccgattcttgcggatagttcatcaaaagctgtacggcctttgattcctcagcctccatactggataaaagctgttctttcagttcttcatccatctcttcaagcaatgcggcgagatcgtcgttatccattttattcattgcgagagtggctttcgttttaccgaccttatgcaaaacggcaagctgaaattcccgctccagctctccgatcatgtcggtgatgtcatcaaccgtcatatatgacagatagcgggcccggtgcttttccggcatttctttaaataaaaatgccatgtcatagggctgaagctcatctatcatgtttcggaattcttttatttttccgtcccgcaataaaatgataatgcgtaatatgagttcgtcataggtcatgttttggaccatcgggactcgtacctcctttacggagacgcgccgtccgtcaagggaagtgcggcggtttgtctcctcatcatgtcgtcactggttatctggctgtatatgggtacttcttctgacatactcgaatggggagaatccatactccgcacctccttatcatgctcagtcgtgtacgttttgaggcataaaaaaaaccttccgatatgaaggcgaaaacaagcacggcaaataaacgtgcggggcctccaatcgtagagctttagcactgtatggcataggacagccatccagctgcgttaagaatcaccttatgtcgatgattcctgttgacccattggcgtctttggacatttttgggcagcagcgtatctccatacaggagcctcacctaacgaagttcttatttgaattgacacactgagattacagaaaaaaaaggaatgtgtcaaccttaaatttgtgatttcagcacatgcctataaaataaacggaataaaggcataaagcccttattccggcaaatcgctttcatcgtcttctgaaaggaaatgataggattcatgcagcatgagcgcgtattccccttcttttgtcggatgcggtacatactcagcctcgttgatatactgctcttcccttttcttcatatgacagacctccttctcaattttagattgtccaaaagaagctccgttatcataggaaagaaaaaatcacttgcggaacgggacatgcagctatatttttcggatcgtaaaaaagttcctaagcagccacgggcccggtttgaaaccgagcgttaattgccacgcgccgatcgcctgcagtccgaactcccgaacgagaaccattttttcactcatgctccgcacatcctcaaaccacacttcatgcgttcttccattttcatcagtataccggaagtaaggggaacgctcctgctgggaataacggatcattgattgatgcttcatcgccgtttccatggcgcgctgattggagatggcagatccgatcgttccgggacggtacggaatcacccaatcatacccgtacagcggaacaccgagaatcacttttcttctcggcaccctgctgatggcaaaattgatcgtttgcctgacctctgttaaaggcgccacgggtcccggctcactgccggcgtggtgccagtcgtacgccataatgaacatataatcgacgacggctccgattccgccgtaatcatatcccctcagccacggcactgcatcacttgttttcgccggaaccgatatcgttaacgcgagctgatgctctgaaagccgggtttttaactgccggagaaatcctgtgaagagatccctgtcagcttctctgacccgttcaaaatcgatatttacaccgccgtatccctttcttaccgttaaggagacgatattgttgacgagattcgttcttgccgccggattctgcagcacttgatgggctaattccggactgaatcccccttctgtcagattcgtaatgacggcaagcgggcgcactctgttctgccatgtggtttctattgcggttctgtcgtttaaatcgttcatgatatctccattcgggccgaaatgatattcaaacaaagaaatcgccgaagaatacggcgcaaaatcattaatcagctctctatccgcttcaggcgtccgaatgacataaaattgcagggttcccgcaagatagttagagatatcagggatcttcactttcatacccgtccgcagccggttcggcggaatatccgggtttgcctgcatcagctgcatctgcggcacataagccttacctgcgataacggcatacgtatcattcggctgaaccgtatattcattaagagggattaaaagcgcctgccccggaacgatattcgtttcctcaagcccgttgacgcttctgatgctgtcaacagggtatccgtactttctgctgatggaaaataacgagtctccagactgcactgtatgaacaaacatagatgtcctccgtttccttttgatcaaaagggctcttcttatctttatgaatgatcttccggtccgattccaaactctgttcggagaaaggctgtttacaaatcagacatgatcaactatgatgatgtcattataaaaaactgtataggaaacgcactaggggtgctgttatcggctgagataaaacatgcggcaggcgtgttttgatcccttataacccgatctggataataccagcgtggggaagtgcagattgaccggagcgcagggtttttccccatgcgttttcgttctgctgctgcatattccctcggatatgcagttttttatttttcattaaaaaacgggggaggacaccgcaatatgaaacttacgatcaatcgtctttcgtaaaatcaactctttcatacttacgactatcgataagaaagcaggagatcacaatgaaaaattggaaaatgagagaaattgtcgtcatgtccgtcatcagtgttgtatttgctgtcatttatttagtatcaactcatgcaagcaatatagcggcaggatttttcggccggatgagctacgaaccgatttacggtatctggtttatcgtctcggtgattgccgcgtacattattcaaaaaccgggagcggctctcgtttctgaaatcatcgccgcgtttgtggagtgcttactcggaaatccgtcaggaccgatggtgattctgatcgggatcgcacagggaatcggtgcggaagcaatctttttagcgacacgctggcgggtgtataccctgcccgtgcttcttttatccggtatggggtcttctgtgacaagcttcatttatgacttgttcgtttccggatactctgttttgaatccgggtttattagccgtcatgcttctcatccgtctggtctcaggtgcgcttcttgccggccttctcggcaaagcaatcagtgatgcgctggcttacacaggagtgctgaacggcatggcgctcggaaaacaattcaagaagaaaaagaaacaggtgaaccaagatgcaggcatctgaaccccttctatccgccggccgtcttaccttttcttatgatcaggatgaaaagccgatttttcaaaacgtgtcctttcagctccgcaaaggagagcgggctttattgctcgggccgagcggatgcggcaaaagctcgctcgctctctgtttaaacggtctgtacccggaagcatgcgatggggttcaatcgggaaccgtttctttatacggaacacctctttcacacctgacagaacccgccgccagatctatcggcgtcgtgtttcaagatccggaccagcagttttgcatgctgaccgttgaagatgaaatcgccttcggcctggaaaatttgcaatatacaaaagaagatatggacgcaatcatcgatgacgttttagaaaaattagagatcactcatctgaaaacgcgaacgatcgcttcgctgtcaggcggttcaaaacaaaaagtggcgcttgcctgtatcattgcgatggaaccggaactcattattttggacgaaccgacggcacagcttgatccatattcggcacgtgaattagtgcggctgatcaaagatcttcaagcaaaaaaaggcttcggccttctcgttatcgaacatcagcttgatcactgggcgccgtggatggacaggacgattgtccttgacgaaacgggtcagaaggtgatggacggagagacggatgttatctttgaaacaaggattgaagagctgatacagctcggcattccgattccgcgtgtgatctcattgcaggagcacgtcagcattccttttacattgtgtaaagaaaatctgtttcacgaacctgtaccatctctgcccgaaccccggcccgccgcgctttcggcagaagacgcgctgagcgttcacgaactgtcattctcaagaggagcagaagtcatttttcaggatgtgagcttttccgtaaaaaaaggttcaatcaccgcgattgccggtcctaacggaacaggaaaatccacgctcctttctgccgcggccaagctcatccgtccgctgggcggagacatcaaaatagacggcagaccgattgattcctattctgaaaaagagctgcggcgacagatcggatatgttttccagaatcctgaacaccagtttgtcacagattccgtcattcaagagctgatgttcggttttgaaagcaacagagccgcaaaggagaaagctcttcagctgttaacccgattcggcatgagacgccatgcctcacagcatccgttttctttaagccaaggacaaaaacgcaggctcagcgtcgcgacgatgcttatgcacaatgtgaacgttttgatgcttgatgaaccgactttcggacaggatgccaaaacggcgcgggagtgtatgcaaatgctccgtgagattcaaaaggaaggaacggctgttttgatggtgacacacgatatggaactcgtctcggattatgccgacacgatccttgtgctctgcggcacgaagctggtgtaccgcggaacgcccgactcattgttttctgatcatatcggaatcgcggagcgggcgcatttagctttgcccctgcggtatgaatggatgaaacacgacaggaggcggaaaaatgaacttgcggctggaggctgttaacccgtcaataaaggcggcggctgtattgttatgcgtcattatgctgtcatttatttataatccgtacacccctgctttgttttatatcatcattgcgggaggcgtcctctcggcggggcgtgtgccgctgaaaaaatggctgctgttcacgattccgtttgtcattctggccttcggttctttatggacagccgccgtattcggaaacgtcccgacaaccgggagcaatctgctgtttaaactcgggccgattgccgtcaacagtgataacgcggcgctcgggatttctatcgcgtttcgtattttatgtttttccgctttgtcgatgatgtttctttttacaaccgatccgattctgttcatgctcagtctgattcagcagtgtaagctgccgcccaagcttgcatacggcgttatcgcgggattccggtttctccctcttctgaaagatgaaatcctgatcatccggcaggcgcacagaatcaggggtgcggcgtctgattccgggctgaaaggaaagctctccgccttcaggcgcttcaccattccgctattggcaggcgcaatcagaaaggcggaacgcacggccatcgcgatggaatctaaaggctttactgggagccgaaaccgcacgttttacagaactgttactgtgcgccgcgccgactggtgctttttcctgctcgtgcttctgttattcggcgcaagctggctcatttcattgttgtttgtataaaaacaggccgccggagtgattcggcagcctgttttgttatgtatgttattgatgataattgagagcctgagcgagattggacttgaccgtaatctctgagaaattaatgccgagctgtacggcggtttgagcaatttccggcctgattccggataaagtggacgtgacgccgatcaatttcagcgcttcaattaatttaaaaatctgatgcgccaccatcgtatcgacaaccactacacccgacaggtcaattaacagatgttcaatcagccgttttgcacatgtgctcagcgtattttcaagaatgaatttggcgcgctccgtgtcaatatcgccgacaagcggcagcagcgccgtccgtttgctcagcgtgataaccggcgagcttaactccaaaatcatttctctttgcgcattcagctgcatttttgagttatgctcagcatgatcgacaaacgtgtaaatcgtaaaatcaaatacttgtgcaattaaattctcccatttcttcctttctccctcggcaaacgaagattcatgtttatcggcaaacgcatcataataactgatgtatagtctccggtttctcatgaattcacggaccacatactggacgggagtatccagatgcttctggtctttcgcaagctcaatcacccaccgctcgaattcttctaaaaattctttttccggcatgatatacattttattaatatgccggtaaaattctttatcctgctccgtcagttcttctgtgatgacgggatttgtcaaagaataaatcgaattcggatccgaatcttccatcgtttcgatccactctttcgcaatttgatccacttgttctgaaaaatagctgtataacgcttcatttatcttcatctctcttctcctttcccatttccaattatagcgtcagcgggtcatgaatgaaaatgaaagctgtcaaactatccatttatttgaaattttttagtccgatagattacgccttttttatgaaaatgcttcaaatgactctttccggccggcatgctctgccataaaatagtagcaacacccttgtatccactggcaagcataaaaaaggagggcttttttatgaatggtgaaatgcatttgattccttatgtcacggatgaacagatcatggatgtgaacgagcttcctgaggggattaaagtgattaaggcgccagagttgtgggcaaaagggtttaaaggcaaggatattaaaatcgcggtccttgacacaggctgcgacatcaatcatcctgatttgaaagaccggattgtcggcgggaaaaacttcaccgatgatgacggaggcaaagaagacgtgatttccgattacaacggacacgggacacacgtttccggaacgattgcagccaatgattcaaacggcggaatttcgggtgtcgcgccggaagcaagccttttaatcgttaaagttctcggcgggaaaaacggcagcggcaaatacgaatggatcattaacggcatcaactacgccgttgaacaaaaggcggacattatttccatgtcactcggcgggccaagcgatgtgcctgaactgaaagaagcggtcacaaatgcggtaaaaagcggtgttctggtcgtttgcgcggcaggaaacgaaggcgacggagacgagcgtacagaggaactgtcgtatccggccgcttacaacgaagtgatcgcagtcggatcagtctcaatcgcccgtaaatcgtctgaattttcaaacgctaataaagagattgacctggtggctccgggagaaaatattctctccacccttcccaaccataaatacgggaagctgacgggcacttcaatggccgccccgcatgtgagcggtgcgcttgccttaataaaagggcttgaacaggacgcgtttcagcggacgctttctgaggctgaagtctacgcccagctcgtgcggcggacccttcctttggacatcgccaaaacattggccgggaacggatttctgtatttagacgcgcctgaagtgctgatggaaagagccgaacaggcacagctgctgtctttctgatatttttctcgtataatgattgatcagtttgtcacatcaccaatttttaaattgtgagattttctattgacagtgatctgaataagctgataagataaccaacaaatgatgtaacttttcaaaaaaattgaaatactttctcttatcgagagttgggcgagggattggccttttgaccccaacagcaaccgaccgtaattccattgtgaaatggggcgcgtgatttttgcgccgagacgattgtctcataaggcacggtgctaattccatcagacgtgatctgagagataagagaggcttgcattttgaagttaaagcctctttctctcatgagaaagaggcttttttgttacatctcacttaaaggaggagacttaatgacaacaatcaaaacttcgaacctcggttttccgagaatcggcttgaacagagaatggaaaaaagcacttgaggcttattggaaaggaaacactgataaagaaacgtttcttaaagagcttgacggtttattcttatcagctgtcaaaacacagcttgaccaacatatcgatatcgtgccggtctctgatttcactcattatgatcatgtgcttgataccgccgtcagctttaactggattccggaaagattccgcagcatcacggatcccgttgatacatactttgcgattgcccgcggtgtaaaagacgccgtttccagtgaaatgacgaaatggttcaataccaactaccattacatcgttcctgaatatgacgaaagcattgaattccgtctgacgagaaacaaacagcttgacgactaccgccggatcaaagaagaattcggagcggaaacgaaacctgtcatcgtcggtccgtatacattcgtcacgcttgcgaaaggatacgaagaatcagaagcgaaagcgattcaaaaacgccttgttcctctttatgtgcagctgctgaaagagcttgaagcagaaggcgtcaaatgggttcagattgatgagcctgcccttgtgacagcttcttctgaagatgtccgcgccgcaaaagacctctatgaatctattacaaaagagctttcaggactgaatgtcctcctgcagacatactttgattcagttgatgcatatgaagaactcgtttcttatcccgtacagggaatcggacttgatttcgtgcatgataaaggcagaaaccttgagcaattgaaaaagcacggcttcccgaaagataaagtgctggcagccggtgtggtcgacggccggaacatttggaaaatcgatgtagaagaacgccttgatgcggctttggatatcctcagccacgctgatgttgaggagttatggattcagccttcaagcagccttctgcacgtgccggtggcgaaacaccctgacgagcatcttgaaaaggatttgctgaacggcctgtcatacgctaaagaaaaactggcggaactcggcgtcttaaaagaagggcttctgtccggcaaagcggccgtcagtgagcagatcgaagaatcaaaatcggcacttaaggctttaaaagcattcgcaacaggagcgaactccgctcaaaaagaagagctgaatcagctgacggaaaaagatttctcccgtccggcaagctttgaagaacgattggcgctgcagaatgaatcactcggtcttccccttctgccgacgacgacaatcggaagcttccctcaatctgccgaggtgcggagcgcacggcaaaaatggcggaaaaaagattggacggatgaacagtaccaagcctttattaatgcggaaacgaagcgctgggttgacattcaggaagaaatcggcttagacgtgctcgttcacggagaatttgagcggacggacatggtggaatacttcggtgaaaagctggccggattcgcctttacgaaatatgcatgggtccagtcttacggttcacgctgcgtacgtccgcctgtcattttcggagatgtcgaatttatcgaaccgatgacggtaaaagatacggtctacgcccaatcgctgacggaaaaacatatgaaaggcatgctgacgggacctgtcaccatcttaaactggtcattcccgcgtgtggatatttcaagaaaagaaatcgccttccagatcgggcttgccctcagaaaagaagtaaaagcgcttgaagatgccggtattcagattatccaagtggatgaacccgcgctccgcgaaggactgccgttaaaaacgcaggattgggatgaatatttaacttgggccgcagaagcattccggttaacgacgtcttctgtgcaaaatgagacgcagattcatacgcatatgtgttacagcaactttgaagatatcgtagatacgatcaatgatcttgacgcggatgtcattacaatcgaacacagcagaagccacggaggatttttagagtacctgaaagaacatccttacgtgaaaggcctcggactcggtgtatacgacattcacagcccgcgtgtgccggcaactgaagaaatctatcaaattattgatgacgcgcttgaggtgtgtccgactgaccgcttctgggtaaacccggactgcggactgaaaacaagacagcaggaagaaaccgttgcggcattaaaaaatatggtcgacgccgcgaaacaggcacgaaaaaaacaagctcagcttgtataatgaaaacagccatccgtaaattgcgggtggctgttttttctgggcatgctacttattctgcagcgcttctgccagttcatacaatgaatcatactgcttaatttgatagccccgcccctctttttgcaaataccctttttggcagaattgcgtcagcacatgcaagagatgacggtaagatacacccaaataatcacagaccgttacgtgcttctctttataaacccctttataagccgtctgcaaaataaaatcagcaagccggttttcaagcgggaacgccagactttgtgaatatttcgaagccataagcgttgccttagcacttaaaaacttagccagctcacgcaggaatttcgcatcctgcagcaattgcacgcggcagcggtaaataggcagaacaaaacaaacagtcttcgctgaggcttgaattccttttgtgtaatacacttcatgtaatagttccatctctccgatgtaatcatttttgttgataaaattaattaaagaaactttcccgttttggtgggttacatatattttcgcttttccttcaatcacgtaaaacaggaagtctggcctcctgccctcttgaataatccattcgtcccgctcatattcgcgcacttccataaactcttcagcggggaaagagaataaatgcgcgattgagtgtttttctaactgatgccgctttttctcgcctttataaatttccatcgtccaccccaaaaatatgagatatctcatattgtctttatgtccttacatgataacatgccaattaaaggaggaacgggaatgaaagcatatcgctggatgagtctgcatttttttagtttttttatgacatggggtgtttttctgccctattggacgggatggatggtgcatataaaaggggtttccgtatccgaagccagtttcattatgagtctgggcctggcggcaagagggatttccacattatttttcttcccttatttatcaggaaaattcagcagcaaagccttattaaacggcgccagaatcgggacgcttctcgcacttttatgttatattccggctgattcttttcaaagcctgcttcttgtcacattagtgctgcatgtgttttacccggctttaatgcctgctttagacagcgcttgcggcgtccttgtacagcataacgaattaaaggcttatgggactagccgacagtggggatccgcgggttttgtttcagccggcgtcatcctgtccgtctttacaggtatattcggagatcaagcgattttatgggcactgcttttgggcgccctgatattcgcatccctaagctttatgcatgcgccagctgttctttcaaaacggccggaaacagaccgtgcaagaaaagagggcatgtttgccttattccgcatcaaatatttcggtctggtgctcgcaatcgttatcttactgcaggcggcacatgcatcttactacaattacggttatctctttttgcaggaaatcgatgcgcccgcatatgccatcggaatcatcatcaacatcgccgttatcacggagattatcttctttgcaatcgctgaccgatactttcatcaatttacggcaggctctttgctcgccctggcggcgcttggtgctaccgtacgctggatactcgtatttgcctttccgcatgtcatcattttctgtcttgcgcagacgctgcatgcctgttcattcgcgatgggacactatgcatttatgaaatacttaattaaaaatatttcacccgcgcaaatcccgaaagcccaaggtatatattcagcgcttgctctcagctggagcactgcggtatttactattttcggaggttttttatatgaaattgaaccccggtatgcctttatcggaatgattgtttgtacgataccgtccatgcttctcgcccttttatacagaaaacttgaaatgaaaaagagcgtttttgcaggaaacgcacaagatatatagccatcgctttatagacgatcacatgtcccgctgtcattttgaccgattttgtgaatgctgtgcgatgtattttctctatatttaaagtatttccttcatatatgatgaaattaatgaagggaattcgttcagaaacttggacagaatcagtgaatataatgatacagtactgcttacgctcatttgggggaactttgttcgcaataaaatgattttcagccaactcataaggagggacattgtgtcacagcctaatatgcccaatatcacccctgtcgttacactttccagagacgataccattaaccttcttctttcgtcaattgctatggaagagctgggaatggcacatattctgaatgcggaaggggaaaaaatccaatacgcgctcggaacgattcccggattaacaggacccccgtcaagtcttgcggatattcttaacctgaatgagagcgtccgggatacgcttgacagcttaatgaaacaggagctccttctcggttcaaaattggacagtatctcaaatatccctacattggcgggaccgacgggggccacggggccgacgggggccacgggtgcgggtcttcaagggattgttgcttttaatccgctgatcgcccctacttacacgaccggacaggttgtcttgtataacggcagctcttatgtcgcaaacgtaaacagcccgtcgggaacccctgaaacctcagctgactatacacttttagctgcggcgggaagcaccggcgctactggttcaaccgggcggaccggaattaccggggctactggcggcactggatcaactggaattaccggcgttacaggaccgaccggagttaccggggctaccggcattacagggcctccgggaagcaccggaacaagtctgacagccacttccggctatgcgagcaatacgggcggcggtgttgtcgcagttattaacggcggcacggccatttccttaccgaatgaacaaaacctctcagcggatattaccgctaatgccgcaaatactgtattcaccgttgctccggcaggacggtactatatttcctaccatattaatttaacggccggcctgctagtaagttcgcgcatcttaatcaacggcactccggctgcaagttcgattattgctccggtcgcgtctttggcaaacttcaataactcctttattgtgactttgacagcaggcagcaccattcagctccagctgttcggattattgggtgcggccacattgcttagaggaagtgccggcgcagctttaaacattattcgattatcttaatggaacatgcaaaaaaaggatcaggcgtttgtccgctgatccttttttaattgagacagaagttcttgcgcgggtttaaattgcggattgaatttcacggattttttggcgtaagcgatggccgtcatatcatggtttaatgcagcatggcatttcgccatataataaaaagctctgaaatcggcggcaccttttaaaatgaagtgatcagcgttttctccttcaacctgcgttccggcttcaaatgctttgattgccgctctgtacttttccaaatgatataatacaaggcctttataataatgaagattgctgtaatcaggataaagcttgagcactttttcaatcccttgttcggcttcttcatatcgcttgagctcaagcaatattgtatattttagaaaatacagaagagacggaggcattcgtttctcacttaaaaattgaaatattgagccgttgacaagatgtaatgctttttcatagtcttttattctgtaacattcacttgccagatgatagactagccacggatcaggattttcctctgaaagttcttcatttaatatgctgatattccgtttatgtttttgtttgattttttcttcctgctccaagtagccgtagtgatgaatcacacatgggagcgtgaaaaaagcattgttttcttcctcattgggagccgagatattctcgtgaattctgccttgatacagaaggcctttatgattgcggaacagcctcggctgcatgctttcaaacgcttcgttttcatcgagctgcttccccgtataattgatgattttcaaaagtccccggctcggtaatccgtcatgaagcagagaagttaaaaaacggcccgtctcctgatcgagctcttcatccgcgtcaagcactaaaatccaatccccttcggcatgctgcagggcgtaatttctggcctttgcgaaatcattctcccattcgaaatcaaacactcttgcctgaaagcttttacatatatcttttgtattatcttgtgatccggtgtctgcgatgacgatctcatcagcgatgtcttgtacacttgataaacaacgggagatatatctctcctcgtttttcacaatcatgcaaagagtcagtttacattcagcatttccgctcattttctcacctttcccgattttggagttgttgattgaaccaaggccgtccaggagtgccgttcatcgttatgatgacaggccgcacccatctgacggcaggttcggcagttgattctgcatcccattcctgaagctgcctgacagcccgcttcgtaatgggatgcgcccggaattcgcgcgggctttcacaaatgaattttttcgttcgttccgtcactgtcttcatttcatgaaagtgccgcgcatacatctgcttctgttcttcttccaagctgatcattaaaaacagccggccgcccgtttccatctgccagcggcacaatgcggagaacagcctgatttcttctttgtaatttgaaccccttcttttatccacggtcacagataatatatttaacagcgccatcgtgagacaatgcaaggcttcaaaagatgtctgtttcgcttttgagatgctcggatacggcatatgcttcacccgtctctttttttatgaacgctccccgccttttttcttccaatcgcagtcctcacaatccccgcactcacagcagccaatacggccgtaaaacaggtcgtcacacggatcttccggatcactgggatcgtccggattccacgggtcatcaggatcgcccggatcactcggattacttgggtcgtccggattccacgggtcatcaggatcaccgggatcactcggattacttgggtcgtccggattccacgggtcatcaggatcgcctggatcactcggattacttggatcgtccgggtctatacaggcttcagcatcctgtaagtagataatgtcttcaagcttcgtctgcaaaaggagttgtgatttcatgacggtgcgcaggagccgttcagtgcttctattgattgatgataattcccctaaggagggatcgccggaagcgctgagaaacatttgaatcctttccgcttccgcctgcagaatatgggatagtccgatttcttccatagccacggatgaaagaaggaggttcagggtctcacatctggagagtgtaatgtcgggggtgatgttcggtatgtttggaagagtcatcgatttctccctcttttctcttggtgtcattatgcaaaagtgctatatcgtattcttattccgggagagaagagatcattactgatgttttcgttaataaaatatcccggatatgaaatccgggatattcgttcgtttctttatttcaattcaagtttgacgtctacatttcctcttgttgcttttgaatacggacagaactcgtgagcggcgtgcaccagcttctccgccgtttctttatcaagatcttttgtatcaatgacgagcgttacgccgattttgtaacccccgtcactctcatcttttaaaaggctgacctgtccttcaatttcagaggtcatgtcgattttttgtttttgggcggcgagttcaagcgctcccccgaagcaggcagcatatcctgccgcaaagagctgttcagggtttgtgccggtttctccgtctttttttgcattcggcatgatgatgtcaaaatccagcaccccgtcttcggatttaatatgtcctgctcgtccgccgactgcggtcgcttttgaagtaaataatgccattattatcagcctcctcattgtacttactgtatatattgcccctgctcatatttttaaacatgattgcaataggaaatgggccgtttttcggctacaataggggtaacgttaacaaaaaagagttggtgaaagaatggcagaaaaagattttgaacatatgaaactggagaatcagctttgttttttgctgtacgcaagctcaagggaaatgacgaaacggtacaaaccgctgcttgataagctcaacgtaacttatccccagtatttggcgctgcttttattatgggagcacgaagaactgaatgtgaaacggatgggtgagcttttgcacctggattccggaacgctgacaccgatgctgaaacggatggagcagcacggaatcatcatgagaaagcggtcggctgaagacgagcgatccgtgacgatcaggctcacagatgaaggacgggccttgcagaatacagcggcagatatccccattgccatgctggaacagacgggactgtcaaaagaggaattaaagcaggtaaaacagtcgctttatgaggttttgaaaacgctgcacggcaaaaaataaggatgccccgaatgggcatccttatttttattctgctgccagaagcttcacttcaatatttcccgctgtcgcttttgaatacgggcacacaccgtgcgctttttggataagggcttcaagctcctgtttctcaatgccggatgctttgacctcaagggtaacgccgagtttatatccttggtcgctttcatctttcagcagactgacatgcgcagtgacctctgtttcaatactcagacgctcttttcttgctacgagttgaagagcgctgtcaaagcaggctgaatatcctgcggcaaacagctgttcagggtttgtggcttgttcgagcttttttgctcttggcgttcccggcatggcaacatcaagattcagcaccccgtcagaagacgtgactttcccttcacgtccgcctgcggctgaaacggttgcagtaaataatggttttgtcatataaattcacctctattatattgtgtacaatttaattttacgaaatataatggaaaccgtcaatctttccgcataaaaaaagcttaccctttttgaaggataagcttaaaagattatacccggatttgtccgtttcctttgatgatgatttttgtagatgttaacgccggaagtcccatcggccctctcgcgtgaagcttttgcgtgctgatgccgatctcggctccgtatccgaattcaaaaccgtccgtaaaccgggttgaagcattatgatacacggcggcggcgtcaacggcggtctggaagtaagccgcatgctcggcgttctccgtcagaatggcttctgaatggtttgtgccgtactgctgaatgtggcggaccgcctcctgtacgtcctgcaccgtttttacactgagaataggcgccaggtactccgctccccaatcggcttcttctgcttgtttcgcttgaggctccagtccgcaaatcacctggtctcctcggagctccacccctttttctgtcagctgattcagcagctttcgtccgtgttcttcggcccatttttcatgaatcagaagagattcaatcgcattgcagaccgaaggacgctgtgttttggcgttgatgacgacctcgcttgccataaggggatctgctgactcatctatgtacacgtggcaattgcccgctccggtttctaaaacgggtacggttgattccctgaccacaagatcaattaaatttttaccgccgcgcgggatcaatacatccagcccatcatttaatgtaaagagctgtttggcggtttctttgcttgtatcttcgatgagctgaacggcatcaatcggaagctttgacagcccaagtgcgcgtttcatcacactgacaagcgctatgttgctgtggatggcggaagaacttcctctgagcacaaccgcgtttccggttttcagacagagtgtggccgcgtctacggtaacgttcggtctggcctcatagatcatgcccactactccgaggggcacgcggatcttttcaattgataatccattctcttttttaatggtctccaatgattcaccgacgggatcttcaagaccgattagcagttccacggcgtccgcgatatcgagcaggcgtttttcatcaagcgtcagcctgtcaataatgtcaggtgtcaatcctctgttccgtcccgcttcaatatctttctgattctctgttaaaatcagctgccgttcatttctgagtccgtctgcaatacattggagcgcttcgtttttttcagccgtcgttttcatgaccatttcggcagccgcttcttttgccaaagccgctttttgcaatacttcactcatttgtgttcccccttgtcaaataaattcacccaatcatctctgtgaatcacttccacctgcttcgttcctgaaagctggtcgctccgcttccctttggcttctaaaatttcatcggatgagtactgtgtctgccctttgccgataatgccgccgggccctctgacttccactacggctcctttcggaaaactgccgcagacatcggcgacgccggccgggaggagacttgacccgttatggatcatcgcctgctccgctcccccatcaatgatgatttcccctgatatcggagaatgaaacatgatccattgccgtgtattattcactgaggacaggtctttatcgccgatataagtgccgtcgccttttccgtttaaaatcaccatcagtttttcacgtccggagccggttccgataaacaccttcaccccgagcgacaatgcggtctgggcggcgagaagttttgacttcatgcctccggtgccgacctttgagcctgctgacccggcatatccgagcaattcaggtgtgatgtcattcagatagtcaaaccgctttgcgtccgggttttcattcggattggcatcgtacagcccgttaatgtctgtgagaatcattaattggtctgcatgaatcaaaccgcttacaagcgccgacagcatgtcgttatcaccgaacgtcagctcttcgactgatgtggaatcattctcattaataatcggcacgacgccgcgctccaacagttccattacagtggcataggcatttctgtaccgctctctttttgagaaatcatttcttgttaataaaatttgtgccggcgtcagaccgtatccttttaaatggtccatatattgctgcattaaaagcgtctggccgactgcggcagctgcctgttttccttttatcgtaacgggtcgcgacggatagccgagagcggaaaaacccgctgccaccgcgcctgaggtaatgaggatcacttcatgcccgttttcttttaataaagaaatggcttccgtatgttccttgatttttgcttcatcaatacttccgttactgttggtgagcgagctgctcccgattttcacaacaattctttgttttttcatcgtttctcctccgtggcaatcaatccaaaccggctctcgtcaataaaaaaagcccattccgtcctgaaaaataaggacgaaatgggctttccgtggtaccaccttgtttgaacgcgtttttcacgcgtcccgctttcctgtaacgccaggtatcgcgcctgagttttcccctcaggactccaaggcaggttcggcaggtttcatgcggcaaaatgtttcagcgggccattttgctctctgtcacagaaagttctgcgtactgatcctcttcaacgctcaatgatttttttatattatgcaaagaaaacaggttcttgtcaagacattttcatccataaaaaacagcccgcctccccggcggaccgtcattaattaaatacgatcgttttgtttccgtgaacgatgacacggtcttccagatgccattttacggctcttgccaacacgctccgctcaatcgttctgccgatattcttcagatcctctgcgtgatctctgtgatcgacgcgttcaatatcctgttcaataatcggcccttcgtcaagatcgtccgtcacatagtgagaggtcgcgccgattaatttcactccgcgctcataagcccgtttatacggattagcgccgataaaggccggcagaaatgaatggtggatgttaataatccgattcggatgggcagatacaaaatcagacgtcaaaatctgcatgtagcgggcaagaacgatcacatcaatcttatactgctccagcagctcaagctggcgccgctcaacttcggcgcggatatctttgttagctttcatgtaatggaatggaatattcagcggctcgaccacttctttcgcctcttcatggttgctgatgacgaccgcaatttcggccatcatattgccgctttgccattcccaaatcagttcatgaaggcagtgcagctctttggatacaaagatcgccactcgcttcagctcacttgccagagagaggctccatgtcatgccgaatgtctgggcgattgaggcgaacgcctgctgtaaatcctcttttttctcacgaatgcccttgcagtcgaattcgatcctgagaaaaaaacgtccgccttcagggtcagtcgtatattgatttgattcaataatatttgcgccgtgttcaaacaaaaacgcggaaacagccgatacaattcccggctgatcggggcagctgacaagcaggcgccctttttcctcattaccgcggcggtattctttcagccgctgtgtcatatatgaattcatctgttttaatccctcgtatcttcataattcgtaacttattatagattatactgaaaatttgataaaaatcaatttacgaaagaattttcagccctacggctgcgcacaaaataagcgcaatgaaaaagatgcgcttcgcatccttctgctcgccgtagaaaagaatgccggctagtgcgccgcccgccgtgccgataccggtccagatcgcataggccgtgcccatcgcaatcgtctccatcgcataagaaagcagggaaaaagaagccgcaaatccgacgataatgaaaaaaatccacttgactttcttttctttttgaaattgattcattaaaatgaccccgagcatttcacaaagacccgcggctatcaggctgatccaatgcattacgccttctcctccttcgtctcaggcttatcctgtgtgaccagctttaatccgatgacaccgatcagcaaaacgccgatcagcacgatttttaccggatcggcctgttctttgaaaagcaggatttcactgagcacggtgcccgctgtcccgagtccggtaaagaccgcatataccgttcctacgggcaggctgtccgtcgccttgattaatagataaaaactgatgatgattcccgtaatcgtgccgccccacgtcagtgccgaatcagcatgtttcaggccggtgacccataccacttcaaatacggccgctatgaccactaaaccccatttcatgttcttcatcctttctgtttccgggcaatacaaaaagcccggaatagtcgtctcacatgagattgactctcccgggcttttttccctccgtgtgcatatgcgggatatgtccgcatatgtgttttctctcggaccaggccatgtatgaacatgcggaaccctagaaaacatgtctgttcgtatcatactacatttcgccgaaacgttcaacgtcagatgtgatgtcaaataccgtcagccgcctctcccatttggtaacggtctcaccgggcaccatgccgattttttccgcgacgcggacggaggcagcattttccggatcaatcagcgccgctatgcgtccgtattgctgcgtatgaaaaccgtagtccagacaggcgttcgccgcctctgtcgcatagccgcagccccagcggcagcgggcaaacatatagccgatttccatcaaagtgtttccgcttatcgtctgcggaacgattccgcattgaccgagaaatgcacccgacactttatcctctgcgatccaaagactgacgccgtatcctgcggccaatcgtttgttccaggcaatccattccttcgtttcccgtctgcttttaagagaaggataatatttcatgacctctctgtcggtaaacagcccgtacaaattgtcttcatcgtcatcccgcatagtccgcagacggatacgcccggttgtcaggatggtgccggaagacttatgtttcatcatgcacgccacgtctcctttccctgtaataaattatggacccggcaggaaaagtcctttttcagcataaaaaaaccgcttttaaaaaaagcggtttgacgattaccaaggtttatctgttccgagcgcctcggccagggccttgctgtgttttaagcggttttttcgttctccggcgcgctgaacggccgtattgtgaagcatgatttcttcctcggtttccggcacgatccgcggaacgggcaccgatttcccgtttgaatcgagcgcgacgaatgtcagaaacgacgttgccgcaagctcgcgttcacccgtcatcagatgttctttaatgactttgacaaacacctccatagacgatgtgccgacccatgtgacgtaggattcaagacatacggaatcctgttggccgatcgggcgcaaaaaatccacagaatccattgaggccgtgactgtttcacaccggcagtggcgggccgcggaaattgaagcgatatcatcaatatagctcatcagctttccgccaaacagcgtattgtgattattcgtatcaagcggaaaaaccctgcttgtcttgacaacccttgtttctttgcaaaatcttgattctggcaacttcatattatttaaactcccctttggtgtctggtcgttttgacatttcatctgtaccctattaaacaatactttgatcgttttgtctaaaattttaaatattaagttggttagatattctatcagaaatgtttcattatttatcacatccgggaataataaacgcacattgaataccgataggaggatatcacatggacgtatccatacccaaatccacgcggaaaccggcttgccgcagtgagtttgatgctttgcagacagtcatcttatgccggccggaacacatgaccatcaaggatattattaacggaacgcagaaacatttcaaacaagaaaatattaacatacccgttgccctcaaacagcatagtgagtttattgacattttaagatctcatcagattgaagtcgtcctgctgcctgccgatcccgctttgcctgagcaggtattcacccgggatatcggatttgtcttaggcgagacagcgtttatttcaaacatggcggcttcagtccggcagggagaagaaaaagtgtttcaagacctgcttgacgataagaaaatcccttatacgcgactgaaaaaagcgaacattgaaggcggcgacatcttgatcgcagacggcaccgtttacgccgggctgagcaagcgtacggataaagcggctgtccgggagctgcgggaggcgctgccggagatgactgttgtgccgatccctctcaaggaggatttcttacatttggactgtgtatttaatatgatctcggaaacggaagcgctatactgtaaaaatggcttgcggcagaaagaaattgatcttctcgccgaacgttttgagatgatagaagtgcctgaagaagagcaattcacgctcggcccgaatatcctgtcaatcggcaatcagacaattatcagcctgccgcagcaccgtcatacgaaccgcgagctcagaaaaaggggttatacggtcattgaaaccgagttttccgaaattatcaaatcaggcggttccttccgctgctgcaccttgccgcttgccagaacatcttaaacatttacaaggcagtttccttcaagatacgttaatatagagaagacaagactctaaagggggaaaccgaatggctaagtacataggatacgcgggaacatatacaaaaggcggaagcgaaggcatttattgttttgaacttgatacagaagcgaaaaggctcagccggccgaagctggcagcaaagctcggcaacccgacatacgtcactccgaattctgataacagcatgctgtattccattgaaaaagcagacggaaaaggcggcgtcgcagcctatcagattcatcagaacagcggggaattaacgtttgtaaaccaccagctgattgaaggcccgtctccatgccacgtcagcattgatgataaacatgaatatgtgttaaccgctaattaccacagcggaaaagtgcacgcctttcccgtcaatgaggacggaagtctgcaggagccggctgccgaagccgctcatacgggaacaggtcctcatgaaagacaagagaaaccgcatacccatttcgctggctatacacctgagcataactacattgcagccgtcgatttagggacggatacgctgtatacgtaccaaatgaaaaacggttcgctcacagaggtgaaaactcactctttcgcaccgggttcagggccgcgccacatcgttttccatccggcggaaaaatacgcctatgtcatgacggaaatcagcaatgaagtcatcgcgcttgaatacaacccgaccttaggtgaattcagagagctgcaggtcatttccgctttgcctgaaggctttacggacaaatcgcaaggcagcgcaatccgcatatctaaagacggcagatttctttatgccgccaaccgcggacatgacagcatcgccatctttaagatcaaccaatattccggtgaattgtctcttattgaatgggtgccgacagaaggcaactggccgcgtgatttcgcgtttgacccttccgagacattccttgtcgcgtcaaacgaagaaacgggaaatctggttttgtttgaacgtgatccggaaacaggcaaattgactctgcttcaatccgacattccggttccgtatccggtctgcgtgtcatttctgcatcagatttaatcaaaaagaaagctgactttatattgtcagctttcttttttgtataaatggcaggcgacaaaacgccccgccttcacttcttcaagctcaggcgttatcttaccgcagagctccatcgcttcagggcaccgcgtcctgaatacacagccgctcggcgggttaagggggctcggcagctcccctttcagaataatccgttcacgcttgtcctcaagaagcggatcaggaatcgggattgaggataaaagcgccttcgtataagggtgaagcggttcccggtaaagcgcagcgctttctgtaatttccatcatgcggcccaaatacatcacgccgatccggtcgctgatatgcttgaccattgataaatcgtgggcgataaataaaaatgtcagccctttctctttctgaagcctttttaataggttgacgacctgagcctgtaccgacacatccagcgcggaaatcggctcatccgccacgataaattcgggatgcagagagagcgctctggcaatcccgattctttgcctctgtccgccgctgaattcgtggggataccggctgccgaaatccggatggagcccgacagcttcaagcagttcatccgccatcatcatacgggcttttcttgtattgtaaagattgtggatttccatcggctccataataatttcccttacggtcagacgcggatttaacgaggcgtaagggtcttggaaaatcatctgcagcttgcggaagaagaccgaccgctgttcggccgcggcacggtgtatatccgtcccttcatatgataccgaaccggccgtcgggtcatacagacggagaataactcttccgagcgtcgatttaccgcatcccgattctccgacaagtccgaatgtttcccctcttttaatgtgaaagctgacaccgtcgactgcttttacggctttctttcttcctgcgtcaaaatgcattttcagcccgctgacttcaaggagcggagatgccgtcattttctattcccccttttcgcttatacagcggcgtacggtgcataattctttttcatagatcgttccttccaaggacagcacttcgattgtttttcccgttttcggggagtgcagcattcggccgtctcccagcgccaaaccgacatggtgaatcgcgccttttccttcttcataggcgaaaaacaaaaggtcagccggccggatatcgtttaccgccgcgccgcacccggcttttgcttggtcctttgcatcacggggaagggtatagccgtttgctttaaatatcgaatacataaacccggaacagtcaaacccgaaaccgctcagtcctccccataagtacggaagcccgagaaacatcatgcccgtttcgatgacctcggccgcccgtccttccgtatgccggcactcgtctgcgtcagcttcatttacgaaccgttctccgagaggcgtcacaacccgaaaaaagcctttctcacgtcctgatgccggaagacgcgttaagaaacttacttccaagtccggttcgccgttagtgtgatataaaaaagctgtcggtttggtaatccatacggcgggcgaagatgaaaaaaagccgtcttttgaaagctggcttttttttatccagcccggatatccgcgcgcatccttgtttgagggctggccgggaacggcgacaaaagcccattccccttcctctttgagaatgatcacctcttccccgaaaagcgcttgcgtttggacaaggttgtctgtgcataattgcagccgctcttcatatcccatagacgctaaccattttctgatctgcggcgggttttcaagcatcggcgcatcatacgaacggggagatgacggcatcgtccatacgttggctgccgccgctgtaacggctgctctcatcttttcgcctcctcttgtttcgacaccccggtaatgccgagacccggttcatcgggaatcgtaatctgactgccgctgtatgtgatgccgcctttaatcaaatcatctttcagcataagcggcgcatcaaaatcaaaccttgtcacattccgtttgcccgcggcaaaatgagccgcggcggtgatgccgagcttggtctcaatcatgctgccgaccatgcattccacgccgcacgtttcggccatcgcattgattgtttccgcctgctttatgccgcccgctttcatcagcttaatattgattaaatcggcgcttctcgtctgcagcacgcaaaaggcctgacggggagtaaagacgctctcatccgccataatcggcgtgtctacggcatcggtgacctgcttcagcccggcgatatcgtctttatgaacaggctgctcgaccagctcaatgccgaggccggcgtcttccatctttcggatcgcagtcacggcttctttcggcgtccagccttggttggcgtccaatctcagtttgacgtttccgccgacacgtgatctgatcgcctgaatccgggcaacatcgtccgatatgtcacctatgccgacttttatctttaaaatatgaaatcctttgttcacatagcggtctgcatcccccgccatctcctcaggagaattgacgctgacggtaaaatctgtttccagtgtattccgatagcctccgagaagccggtaaagcggctgtccgtgcatttgcgcccatccgtcatatacagccatatccaccgcggcttttgcgctttgatttctttccaacagccggctgatatcatacaaaacagcttctatgccggaaaggctccgccccaagagagcgggcttcagcacatcgcggacggcgctttcaataccgtccgtgctgtcgcctgtaatgacaaccgtcggcggcgcctcgccccagccggtcagaccgttgtcaaatgtgagcttcacaatgaccgattcagcattgtaaaccgtgcgcaaagcggtcttaaacggctttttcagcggcacggacatccgtcccgtttgaatatctgtaatcctcacgcctgatcactcccttccggaaacccccgattcaatcgttaccgctttggccgccgtatccataaccgcgcgggctccgatcggaacggcgaagctcggtgaacaatggccgattttaaagcctttgagcgcgggcttccctgatttgacaatgtaatcgttcagcacttgctctaaagtaagcgacttttctttatgcttcggttcgcattggtgaaaatcacagaccagtattccggctgcgtctgacagttttccggccatctttaattgattcagcatcctgtcgatttgatacggctcctcatcaatatcctcgataaacagcaatttgtctttcgtatcaatttcaaacggcgtgccgagtgtggacgtaatgagcgacagattgccgcccgcaagctctccctcggcccttccgcctgtcagcacctccagcggagaaatgtcctccgtataggtgaattccgtttctgtaaaaagctgatgatacgacgcttttgtcaggggttcagcatcttcaagcccgacatccgtgctcagcatcgggccgtgaaatgtgacgagccccgtattttgatgaatggcggtatgtaaaaacgtaatatcgctgtatccccagaaaattttcggattgcggcggattaagccgaaatcgatgtcggcggcaatgcggcccgtgccgaatcctccgcacgcgcatatcaccgctttgacattctgatcactaaacatgtcatggagatcattgaggcgcgcccggtcttctcccgccaaatagccgtgacgggtcttcagcgcccggccgagtttcacttgaaggccaagctcattctctaaaaacagcagcgcggtttgcagcgtcccgctctcaggcgggcttgcgggtgcaatcacaccgaccgtgtcgcctttttgcagtgctttcggtttatggttcatgactttttcaatctcctttccggattgaaaagtgaaacacgccgctcctttaacggcaaaagagcggcatatgtttccgctgtaagatcaggacttttccgcccatttcagatcaatgtaaccgacggggtgccggacaatgcccttcacgccgctgttctgcagatgcacctgattgtaaaagtaaatcggaatgatcggagcctcgttcatgagcagcttttccgctttatgcatgagcgcaaaacgttttttggcatcggcttcctgttttgcctgcttgatgcagccgtcgtatgccgcgcttccccagccggtgcggttcatggaattatccgtttggaaagcctcaagaaaactgatcggatctgcgtaatccggtaaaaatgagctttgagagaactggaacttcagtcctttctgctcttctaaaaagacgttccattccatattggcgagcttaacgtctataccgagcacacttttgagcttctgctgaatcgcttccgctattttcttatgctccggttttgtgctgtatgtcaatgtaacggcgggcagcttgtcataatgctcttctgccatgcctttttccagcagttttttggcttctgattcatccggagttagtaaactgccgcccgcttcgcggaaatctttcccgtcaggctgagtaaatcccggggatacaaaggcatgtgccggcttttcactgtttttggtcacataatccgtgatttctttctgatcaatcgctgccgcgaacgcttttctgatcttttcattttgaaacggctccattttaacgttaaaacgatagaaatagagtccggcctgatcccacgtgcggacattttttcctcccatcagctgctcgctcagctctgccggcacaaaggcggtatccaaatcccccgactggaacatctgatagtcggtattccggtcactgaccatcgcccatgtcactttatccagtttcaccgtctttttatcccaatacgtctcgtttttgaccatcgtcatgctgtcgtcatgcttccattccgtcagtttgaacggcccgttgccgacaaaagtttttgcttcagtgaaccatttcgcatcagccttggcgaccttctcattaatcgggaaatacgccggattggacacgacgctcaaaaaataatcctgcggggccgccaatgtgacgacaagcgtttttttatcctttgccgtgactttcacgtcttcttttttgccttttccgctgttaaattcttctccgcctttgatcatatagccgagaaaagcggaagatgcgcccgttttcggatcgagcatccgcttccaggcgtacacgaagtcttccgccgtgacgggatcgccatttgtccattcggcgttatctcggatattgaaggtatatgtcagcttatcagcggacaccttccagctttccgccatggccggttcgggcttattatcttttccgagcctcgtcaatccttccatgatgttattcagcggctgccaggaaacattattaaatccgatcggcggatcaagtgaggtcggctcattttcgttattgagccgcagcaccgtctctcccccctgttcttttgctttgccgggttctgtccccgcctgttcattggctgtacagcccatcagagcaaacgaaacaacagcaatcacaccaatcgcccatctctttttcatttcaatccccctttttcctctgctgcagtcagctgctgcttcagccgctctgcacggtgatcctgaagccagcagctgacgatacggcttttggatttcacggttgttgccgggtataccttttcacagacgatcatcctgtccgggcagcgggcggcaaacgggcagcccggcggcggatcgaataaatcaggcggcgtcccgtcaatcggcgaaagctcactatcttccatatccagccgcggcactgaacgaagcagcccctttgtgtatggatgagccggacggtaaaaaatatcatgcctcgtgccgatttcggcgattttccccgcatacataacggcgactctgtcggcggtctgagcgacgacgccgagatcgtgggtgatcagaataatagacacgcctgtttttctttgaatcttcttaaataattcaaggatttgtgcttgaattgtcacatcaagagccgttgtcggttcatcggcgatcataatttccggctcgcagatcagagccatcgcgatcacgatccgctgccgcatgcccccgcttaattggtgggggtactgcttcaggcgggatttcgagtccgggataccgaccagatccagcatggcgagaacctcggattcagcttgttttcttgtcatggcgcggtgttccaacagcgcttctgagagctgatcccctatggtcaaagtcggattgagcgccgtcatcgggtcctgaaaaatcatagaaatatcgctcccccggattccccgcatttcccgatccgacattcggcaaaggtctttctgtttaaattgtatgcttccggattcaatctttgccgaatgtttcggaagaagacccatcacggcttgtgacgtcacgctttttccgcatcccgattcaccgacgatcgcaaacgtttcacctttatataaatcgaagctgacgcctcttacggcttttacagtgcctccgtatgttgaaaaagtaacatgcagattttgaacggaaagaacttgctgcgccatttttcctacctcctcagtttcgggtctaacgcgtcctgcaagccgtctccaagcacgttaaacgcgtacatcgttaaggaaatgaaaaaagcgggaaaaaacagccgccaccaatggcctgataaaatcgccggcagcccgtcatttgccatgactccccagcttgcaaacggcgcctgaatgccgagtccgagaaaacttaaaaatgattccgcaaaaatcgccgccggcaccgtcagcgtcatttggacaataatggctcccatcgtattcggcagcagatttttcttaatgatccgaaatgttttcgctccaaacgttttcgatgccaatacgtgttcatcatgcttcatcctcagcacctgccctctcacaatccgcgccatgccgacccatcccgtcactgtcagagcgacgataatggaactgagccccggccccatcagcaccattaacaaaatgacaacgagcagataaggcaaaccgtagagaacctcgatgattctcatcatggcgctgtctgtccggccccctttgtagcccgcgacgcctccgtagataacgccgatcaaaaagtcgatcagcgccgccatcacaccgacaaataaagagatcctcgctccgtaccacgttcttgtaaacacgtcccggccaagttcatcggttccgaaccagtgtgaaaaagaaggcggaagattctgctcggcgagcgtctgccttgtcacgctgtgcggtgatatcagcgggccgaacacagccgatagaaacaggcagcataatatcacaagtccggccatcgccaatttgttctttttaagccgccgccacgcatcctgactgtaagacaggctcggacgcttgaccgactcggtttcaccctttctttccgcgcccggctgaaaccagtcatcaggcacttctgtgtgttttaccgtttcttgcgggagattcatcaggatcaccctttcttatgaagttttatgcgcgggtctaacaggccgtatgccaaatcaaccagaaacagcaggacgatcagaatcacactgtaaaatacggtcgttcccatgatgaccgggtaatcgcgctgattgatgctttctacgaaatatttgcccattcccggtatggcaaaaattttctcgatgacgaaactgcccgttaaaatacttgcggcaagcgtcccgagtactgtcacaacaggcataagtgcgtttttcaatgcgtgtttgatcacaattttgacgggagaaagcccctttgcttttgccgtgcggatgtaatcctgagtcagcacttcggccatgcttgatcttgtcagccgcgcgataatggccatgggaccgacggcaagcgcaacagtcggcagaaccatgtgaacgggactcgtccaggtagctgccggaaaccatttcagatgaaccgcaaattgctgaatcagcagcgtagccattataaaattcggaatggaaatcccgagcaccgcaaggctcatggccgcataatcgagaaagccgccgcgcctgagagcggccgttatgccgagcgcgagtccggaaatcacagcgatgatgatcgccgttatcccaagctcgaaggagacgggaaatccgcgttcaagcatggcgtttacactgtctgacggttttttgattgaaggaccgaaatcaaaggtaagaatggattttagatagatggcgtattgagtgataagaggttcgttcagatggtagtaggattcaagatttcgctggaccgcttcgtttgtgccccgctcttcgttaaaaggcgagccgggtatcactttcatcatgacaaatgtcagagtggtgatgacgaggacggtcataatcatggcgataaaacgtttgataaaataccgcagcaatgccgttcacccctttaacagaatgttgttctcatagcgagttctgtcatgacgagcatggcctgataggcttccggcatgtcttttgcctgaaattgaacgattgtcgttcccgggatgatttctgtgcccggcattaaatgggcccattcagcctgtccgtaattggcaaattcaatgcctaatacaggtttttcaggcggagtcagcggtttgaccttatctttatttttgagcgcataggctgttttttccgtcaggagccgtccggctttttgaggggacaggcatttgaccgcggttcttgaaatggtttgtttgacggcggcagtcgtcacattcgggatcagctcctccgcctcttttgcggcgcaatcatctccggcagccatgatgaccgggacatcgtaaaatccggcgagataggcatttaaccccagttcaccgacaggcttatcatttatgtaaaagtggcggacgccgaatatcatgctgtgcgacatgacgcccggcatcgacgctctcgcatgatagccgataaacatcacacctgaatacgattcatcaagcccctgcatcatggaaaacggcttgacatcccccgtaatcagctctgcctcagggtgaagtttttccgcgagcagattattcatctttgagtggctgtcattcacggtcacttccgtgcatccgttattaaacgcttctgcgatgcaccagtttgcttcttcggtcatcagaaccctgccgcgctcataattgtgcatgctggaattgacaaatgtttcatcaggcagtccggaaatcccttccatatccacagatagatacagtttcatgtaatgcctccttttttatttaaaatttcgatattaaattatgaatattctaacaaattatattaaaaaaggatgaaacatgcaatataccattctgccattatgggaaaaaacaaacccttttcaccgggaaaagggtttgctgatagaaaaagttacataccgtttttgtttatagggtgaccccgaaactgtctgaccgcacttctgtattcgcgatcgggaatgacctgatgcctgatcggtccaggagcctgcggcgaaggcttttcatccgcctgcttacggacggcatgcggtttatgcgccagcttatgtcccatgccggtcgcattcatgacaaatgataaacacactaaaagcaagcttaagatgaaagcaataagaaacaaatcgctgtatgtccccatcagcaggtcatgcggcgattgtgtgccgcgcgcgccccgaagcatgccggaagcatctcttttcgtaaaataccctattaaaacaggtgcgcccatataaatgaacagccttaaaaactgaacggccgtcatgcgtttcaccagttccggaagcggtccgcccaacgcggcgcccatcagtccggctgctacgataagccctgtcccggccgccagcatcacgaaaagcgccgcaaatagaataaacggtatatgatgacccgccgtcatccattggaaattcacgaacaccagtataacagagcctgttatgccgagcatgcccggaccgactttatcatatgctaatgcactgataacagcggcgatggccacgcctcccaaaaggctcgcatataagaatatcagttgagtttgtgacatgtgatatgcggtctgaagctccccgtgaaatgcagaaagactgaccgctatggaaatactgcccgcagcgatcatgaaaacacccaaaatcggctttggaatcagcataagtttaatcgaaatcagcgcatgttcgtttctgtactgcataatcagcaggatcagcagaatgacgatgcttcctccaaatcccgccaatgtctgccatgatgaaaagccccatttcggcagatgaataaaagtataggcggtcagcacggctgatccacccgctaacagaaaaccgatgccgtcaaatggagatttttcagtatttttatgagcgtcatcccgcagccacatataactgaaaatgaggccgaaaaaagacagcaggccaaaaatgccgaacagccaatgccaatggccggcgcttgccgccgccgtgcctaaaacggtccccataatgacggacccgtaaaatccgccgattaacacaaataaggcgtaattccggcgttcaatcggaaacgaaagcaccagcatcggaatcataatcatcagcatagtgcccgccgcagctccctgtaaaaaacggcccgcggcgagcggataaatatcatttgtcacagcagcaagcagcgctccgatgacacccgcggccatcgaaatcatatagacaggccgggagccgaatctttttcttaaatacggccccgccggcacgaataaggcaaatgccatattaccgataataatcggatgaaaagagtcaaagttttccccgccgaccgtctgccggacaaggctttggacagccgaaagagcggtattcgacatcagccccggcccgacagccagcacagcaagcagagaaatgatccagtgatgtttttctttcatttgacagctcctttcttaactatttgacaaagtgaaaaagctaacagatttcccccattagcttgacagaattttttatatcttttcatgtgaaggattgaacataatatcccatttattatttcaaatccgatggaaattgtcaatataaagcgccgccgtccgatttcgtctttttcacaatttcccacaatcttttcattattatcccacactttttgtttaagatggagtcagtaataataggcaaatcatgctatgatgaaatagagaaacggagtgaacatgatggataactatcgtgatgaaaatcggacagaccaaaaagaacaggaagtccttttagtaaaagaaaacccgcagccggccggatattccgagccggacgaggacaagaaaaaacgaagcttcggctggttcagaccgcttctcggcggagtgatcggcggagggctcgccctcggcatctatacatttacgccgcttggagaccatcagactcaagatacttccaatccggctcccgctcaggaaacgtcatcggtaaccgccaagcagacatcttttgaatcagacagcggcaaatcggcaaacagctcatcggcaaattcaagcagcatttcgaatatggtggaagacatttcaccggcgatcgtcggaatcaccaatctgcagaagcagcaaagcagttccgatttattcggattcggatcaagctcggattcaaactctaatgcatcgggtgatgatgcggaaacgggatcgggttcaggcgttatttttaagaaagcaaacggcaaagcgtatatcattacgaataaccacgtggtcgaaggcgcctcttcccttaaagtgtcattatatgacggcaccgatgtaacagctaaactcgtcggccgtgattcgctgacggacttggccgtattagaaatcagtgataaacacgtaacaaaaacggcaagcttcggcagttcatccgctctcagaacgggtgaatccgtcatcgccatcggtgatccgctcggaaaagacctttcccgcaccgtcacacagggcatcgtgagcggcttaaacagaaccgtctcgatctctacgtcagccggtgagtcaagcatcaacgtcatccaaaccgatgccgccatcaatcccggaaacagcggcggaccgctcttgaatacagaaggcaaaatcatcggcatcaacagcatgaaaatcagtgaaaatgatgtagaaggcatcggctttgcgattccgagcaacgatgtaaaaccgattgccgaagagcttctcacgaaaggacaggtggagcgcccttatatcggcgtgagcatgatcgacttggaacaagtgccgcaaaactatcaggaaggcacactcggcctcttcggcaaacagctgaataaaggcgtttatattcgtgaagtggcgcagggatcacctgcagccaaagccggattaaaagcagaagacatcattatcagcttaaaagggaaagaaactgacacgggcagcgaacttcgcaatattctctacaaaaatacgaaagtcggcagcaccgttgacgtgaaaattatcagaaatggcaaggaaatgacgaaaaaaatgaaactgactcaaaaagaagaaacatcttcttaacaaaaatccaaggcagccgccttggattttttatatacagatgaaactttaggcctggatcagccgtatgactcagtgtacaaaggaggatacatacacatgaaacaaaccggacttttgctggtcgttaccggcctgatcttgctgcagctgagcattcagcttcctcagcaaaacgctgcttggggaatgacgcttggtgcaagcattttactgaaatttttcgtgaaccggactgatcatgcgctctctgcacacccagaccggccgcagatgaataaaaaaagccgcgggacattctgtcatcccgcggcttttattttacataaaagcaccctgtccgctggccggacagggtgtttgttaagacatatgctggtcccgataaatcttttcgtttttcataccgtacgctttttgcacgatatagagcggacgatcttttgcttcgtcataaattcttccgatatattcgccgatcattccgagcattaatagaacgatgccgctgaataacagctgtatcacaatcagagaggaccagcccgtaatggtgctgtctgtaaaaagcttcatgtataaaacgataaacatatagagaaaacccgctccggacatgagcattcccgcatagcttgccgccttgagcggtttatgagagaacgttgtgatcccgtccatggaaagcttcagcatttttttaagcgggtatttcgtttcccccgcaagccgctcatctcgttcatattctacagcagtctgcttaaagccgacccagctgacgagtcctctgacaaaaggatttttttcttttaatcttttcatctcatcacagacttttctgtccagcaggcggaaatccccggtgtcgagcggaatatcaatatcagtcacgctccgcagcagccggtaaaacagagaagccgtctgtttcttgaaaaaggtttctccctttcgtttcgttctgacggcgtacaccacatcgtagccttctttccactgctcaatcatatcaaggattaattcaggagggtcctgcaaatcggcgtcaatgacggcgattgcattcccctctgcataatccatacccgctgtgatcgcgatctgatgtccgaagtttctggaaaaatcaataattttcactctcggatcaatcagactttgctctcttaaaatctcaatactgcggtctttgctcccatcattgacaaagatcaattcataatgctcttttgtttgatccatgacttctttcaggcgctgataggttgtctgaatgacgagttcctcgttataaaccgggacgactattgaatattgaatatgtctgctcatgttttttcctcctattcatcagattgaagttcgtatagtgaagctgactgattcattccgcccggcccgccgctcattcggctgtttttacccgcggccttgctgctttttgtatcagctgcatcatgatttttcgttttctgatctgtgcttgattgccatttgtatgaagatactttctttccggttttctcaacccattcaacaatatcgttgtttccgcctttgcccattccggatgttaagaagtattttactttcccttcttttacgagctttttaaattgagtcagcgtaatggccgggtcagacccgctgaatccgccgatcgccatgaccgcttttttcgtttttataatgtaaggcgccgctgtgttggaatcggttgcagcaaatagataatccgctccggcgttatgtttctctaaatagttgatcagttttgtattgacagatgcgttatccattcccatgccttttccgcctgctgacgcaagctgagggcctgtttcaggcaatgagctgttgcctccgtacagaagcggtgtgctcgcccaataaatcggcatcaccatcaagacgagaagggctgcaagtgaaacatagtaactgagcggtttttggcgctgtttgaatacgaacagggcgattgccgccactgcaccgagaacgcctgctccgatgctccagcctgcgccgatttgatcattgtagtttttaaggataaacagctcaaatccggtagtcacaagaatagcggccggcaatagccaagttttccatcccgcctgcttgcggtacagatgaacgagggcgacccatcccgcaccggtaagagcagcaatcggaggcgccagcataatgagataataatggtggaaaaattccgccacactgaagaatccggcaatcggcacaagccacgctgcccaaaagatcgtttccttctgttctgctgataatcttcttctttctctcgccccggcgatcaataaaccggccaatccaaaaatcgcaaacggcaggagccagctgatctgatcagataattcttgttggaagagtctcagcggaccgggtgttcccgtaccgaacattcctgaccctgactgcattttcgagccggtgcctgtaccgctttttcctccgccaggaccgcctttgccgccgtctccgccgcttggagggcctccttgaccgccgcttggcatttgtccgttagatggaggtgccgtcatactgccggtttgtgatttgtctccgcttgctgactggccggccggtttttgcatttgtgaagaaccgccggaagaagacatccctttcgatgcgtttccgtcgggcccgccctggccgccgccggaactttgccccgtcagccgctgaatcccgttatatccgaaagccaattccaatacggagtttgtctggctgcttccgacatatggccttttgccggcaggaatattgtcaacaatgagcggccatgacaatgaaacggctgctaatacggccagcgcgcttaccagtgaaatgatttttttcttaatcgcggtatttgccgccatcatatagaacagcaagaaggccggtaagatcatataagcctgaagcatttttgtgttaaagcctactccgacgacaaaaaatgccgccaaaagccagatcagttttccttttcgaatcgctttaaagagaagccatgtggcgaacaagaggaaaaagaccagtaaagcatcgacattgtttgtgcgcgctacggctacagcaatcggtgtacacgccatgacaaacgaagcgatgcgcgccgccgtttttccgaacgtcggctttattaataagtacatgaatagaactgaacctacccccgccaatgcctgaggcaggatgacactccacccgtgcataccgaatatcagcgcgctgatcgtttgaatctggtatgtaacaggcggtttatctaccgtgataaatccggctgcgtcaaatgaagcgtaaaagaaattatgaaagctttgaagcatactcgttaccgctgcggtgtaataaggattcaccgtatcgtcattccagatgttgtacatattcaagaatgcggaagcgagtaaaataaggattaagactgcgtctatctcgcgttttttcattttcacctgtgttttcactccttttgtttaactttgaacaagtgtaacaaccaaatgtgaaaaatttattaataaacaaagacatttattttgccgtttacaaataggtaaaaagaatgacaaaacgggtaaaaaagcaaaaaaaaagatgcccccgtcaagccggaaggcatctttcattacttctgatttactgaatcggtttcagccgcgcttctatttcagaacggcggtgttcgagataaggcgggagcgcaaccgttttgcctagctcttcaggtttttcatcaaccataaatcccggaccgtccgttgacaattcaaacagaattccgttcggttcccggaagtacagcgctttgaaataataacgctctacaatgcctgagttgctgaaaccttctttcgtaatgatgcggtgccataaagcaagctcctcctcattctgaacacggaaggccacatggtgcacgctgccttttccaggacgctcgcgcggaagatcgtttctttcaatgagatggacttctgtacgcgcgccaccgtttccggattcgagcaccgtaaccgcgccccggtcttcatgtgtttctttcccgatttcagtgaagcccagcacatcggttaacacacgcagcgtcggttctgcatacgggacggtcaattcaacgggcccaagaccgcggaaagaatattcttccggtatgccgctttgcttcaccgcttcaccgatgtcttttcctttttcgtcagctgtcagcacaagccgctgtccttcatgatcctgaaaagcgagtgtgtccctgcccgctattttcacgatctcaccgtgagagacctgatgctcttcaaatcgttttttccaatattgaagcgcttgtgcatccggaacacgcaggccgattgaagaaatactgtttgtccccgcatggaacggcgcgatccgcggaatctcgaaaaacgtcaattccgatcccggattggctgattcatcaccgtaaaataagtgatacatcgtcggttcatcctggtttaccgattttttcacaagcttcagccccaggatatttcgataaaaatctaaatttttctgcgcatcagccgtcaatgctgatacatggtgtattccattaactttcattatgttatcctccagtcaattatctcgatttcgagatattttatatatacaatttatgttatccggatcgtaaagtcaacccatctgcttcacagacggtctgcagactgccgctctcaaaataacgaacttttgatattaaaaaaccattaatgttcgcttttaaaacagtattttttccttctcaaaagcataaacctttatcttttaggcaaaacaccaaaatcagaaaatttattttattcgtgtttcagcaattagggtttacaatatggaaaatagttttttcagcataacgattttacatctggagggaaaggatatgcagattgaagagaatggacttaaaaaagagatcggccttaccatcgccctctcacttgttatcggcaccatcatcggttccggcgtatttatgaaaccaggcgccgtgcttgcctactccggtgatgcgaaaaccgcgcttatcgcgtggctgttaggaggcattttgacgcttgccggcggcttgaccgttgcggaaatcggcactcagattccgaaaacgggcggactttatacatatctggaagaagtgtacggcgaattttggggctttttgtgcggatgggttcaaattatcatttacggccccgccattatcggagcaatcggcttgtatttcggctctttgatggcgcacttgttcaattgggattccggctggtctaaattaatcgggatttcagccgttttatttttaagcatcattaacattatcggaacgaaatatggcggcatcgtacagggaattacgactgtcggcaaattgattccgattatctgcatgatcgtgttcggcctttggaaaggcgatcagcatattttcacagccgtcacaagcagcatgtcggaaatgaatttcggcgccgccatactggccaccttgtttgcttatgacggatggattctgcttgcggcactcggcggcgaaatgaaaaatccggaaaagctgctcccaagagcgatgacgggcggactcttggtcgtcaccgccatttatcttttcattaactttgcgctgctgcacattcttcctgcgaccgacatcgtcaaactcggtgaaaatgcgaccggcaccgctgccggaatgctgtttggcgacatcgggggaaaattgatcagcgtcggaatcatcgtcagcatcttcggctgtttaaacggaaagattctcgcttttccgcgtgtctcgtttgcgatggcggaacggaaacagctgccgtttgccggacagatttcgcgggtgcatccgacattccgcaccccgtggattgccgtgtcatttcagatcgcgctggccattattttcatgatcgccagcaatcccgataagctgtctgagatctctattttcatgatttatattttttacgtcatggcttttttcgccgtgtttatcctcagaaaaaaaagcggcggaaaaccgcgcgcctacagcgtgcctttgtatccgatcattcctgttttggccatcgcgggttcactgtttgtgctgatcagcacgatcattacagatacactgagctgcgcgctgtccctcttgatcggcctcgccgggctgccgctttatttttggctgaaaaacggcagaaaaaactgacaaaaacggttccttttacgggagccgttttttttctggcaaaatcacgtgcaaaagttgacagcaaattcacatcttttgttatactttttaagcaagatgtctgaattcgaagtatgttacgtttttttggcgaagtgggtaacataagaaaaacaggatgagacacgtttttacgaaaaaatcaagaggcgtttttttcgactttatctgttttttttcgacaaaaggctatataataatttgatgtgtgcattgtctcattcaaacaatggagggtttttaatgataaaaagaaaaaaagataagttctcactccttttaacagaaatcgcaaaaaacatagacgaaaccgcagaatactttgtcaactttaaagtgacgaaccagacgactttaaaggaatttgccgatacgttaaaagagtttgaaacaaaaggagataatcatgttcatgtcatgattaaagagctgaacaaagcttttatcactcccattgaacgtgaagacatccttgagctgacaaacagcctcgatgacgtgcttgacggaatcgaacatttttcagcaatgatggagattttctcgatcacttcttcagatgagcatatcgataagttcagcggatacatcagagagtgcgcgaaggaaattttaatcacgattgagctgcttgcagaaaaccgattgaaggacattcaccctcacgccattaaaattaaggaatacgagcacagctgtgataacctgcaccgtaaatcattaaaaaatctgttcggcacagaaaccgatccgattaaagtgattcagtaccgcgagatttacgaaacgcttgaggaaattgccgactcttgccaaagcgttgccaataaccttgaaaccattattatgaaaaacgcgtaacgagggttataatggatactctattacttttaacgatattaattgtcatatgcgctttggtatttgacttcattaacggatttcacgataccgcaaacgcaatcgccacctcagtttcgacaaaagcgctgaagccgcggcacgcaatcgtcatggccgccatcatgaactttctcggagcgatgacatttaccggtgtggcgaaaaccattacgaaggacattgtgaatccttatacattagacaacgggtcagttgtcattctggcggctctactcgccgcaatcgcctggaacttgatcacatggtatttcggcattccgagcagctcttcacatgcgattatcggagcgatcgccggagcggccattgcagcgtcaggttttgcgacgcttaattataaagggttcattaagattatcgaagcacttattttatcgccgattatcgcctttgttctcggctttatcgtatattcgatcgtgaagctgatttttaaagacagcaatctggcgaaaacaaataaacgcttccgcagagtgcagattttgacggctgccattcaatcctatacacacggaacaaacgacgcgcaaaaagcgatgggtatcattacgatggcgcttatgacggccaatttacataaaagtgatgccattcctttttgggtgcagctctcttgcgccctggcaatgggtctcggcacatccatcggcggctggaaaatcattaaaaccgtcggcggaaaaattatgaaaatccgtccggtaaacggcgtatctgccgacttaaccggcgcagccattattttcggggccacgtttattcatctccctgtcagcacgacgcacgtcatttcgtcttccattctcggtgtgggcgcttcccaccgcgtaaaaggcgtaaactggggaacggctaaacggatgcttattacatgggtcatcaccctgccgattgcaggtacactcggcgccatcgcctttttcatcttagatctctttttctgatgacatccgcttctttacagaagcggttttttttgtgacaggaaaatgatgtcatgacatagaatgaacatagcagaccatttttcgaattgtgagggatgctcatgcttttgttttttcagatcatggtgtggacgatggcggccgcactcattttatatgtgtacgcatcctggcggtatgaagcaaaggtaaaagaaaaaatgtttgccatccgtaaaacgtggtatttactatttgtagtaggcgccatggtctattggacatatgatcccgaatcgctctttgccgcatggagacaatatttgattgttgccgtctgctttgcccttattgatgcgtttatctttttgagcgcgtatatcaaaaagctcgccggcaatgaattagagacggatacgcgggaaattttagaagaaaataacgaaatgcttcactcctatcttgaaaaactgaaaacctatcaatatctgttgaaaaatgaaccgatccatgtatattatggaagtacagaagcttatgcggaaggcatcagcagactgctggccgcttatggagaaaaaatgaatgtcacggcttccttgtgcgactattccgcacaatcggataaggaccgcttgacggagcatatgcctgatgcggcggacgttcagtcccgtcttaaccgtaaagacgtctactatgatcaaaaaggcaggcttgtgcttattccgtttacagtccaggaccgccattacgtgatcaaactcacgtcggaaaacctgttgacggaattcgattatttgcttttcacatcgctaacgagcatttatgatttaatgctgccaatagaagaggaaggtgacggttaaatggagcaggcatttcaaaacgggcagccggaacaaagagcgaaaccgttcaaaatgtttaaaaaacgttcaatgacaagtatcgcaagttaccaggtcagccctcataccgccagaattttcaaagaaaacgagcggctgattgacaagtataaacaaaaaaaagcttgattacactaaggacaggagacacggctcttgtccttattccttttttccatatctttcatataataaaaccaacaaagagatgcgacaggtgatgatgtgaagaaaattgtcagacgcgtaaagtttgtggattacggacgcttcgggctttccgcttattcgctgaggatgcgggcgaggaatctcgggttattgaaccggttaaaaaagaaaaaaggctgaatcccgcaatgtgaacgggactcagctttttttgttaaagctgcatcagaattttcgcttttacagcgggaccgtagacgccgtcagacgtcagtccgtttacagattggaagcgggccacggcatctgccgttttcggaccgtagataccgtcaatgccgttattgacagctcctttttcaggatagaaataaagcgcggcgagcgcgttctgcacctggtataccttttcaccggacgtgtacggctctgtcagcttgatcacctcgtccggaagagaatacagtgcttcaaccggcgggctgacgatcagcacttgtccgactttaatcaagttcgggtcagcgatgttattccatttctgcagatcggccacgctgacgccgaatttccgcgcgatcgccgacagtgtatctcctttttggacggtatacgtctgtctttcctcagaaccgattcccgctttaaactcatcccatgtatccagcagtcttctcggacaaagctttcctgaccaatgcttgtgcgcaacgacattcgcaagcgggatgccgtgcgacgtcattaatgtgcggatgagccattgggcgtttgccacggcctgtgaaaagttgccgtctgcgttttcacaaatttcaataccgatggatttacggttgccgtccccgtttccgtcaccggcatgccagccgttttcgttcagcggaagatgctgataaatttccgtatcatcgactgtgaaatgccagcttgtcggtgtatcgggatttttcacatagcttgcgtgacttttggcgttagctccgactgcggtattggctgtattgtgcaccgtaatgtaaatcggtgtcattgcatagcctgggcggttattgtttcctgccgggataaaatcctgtgtgatttttaccatattctcatctctcctatttcgataaattgtttatttttaataaagcctgctgttttttcccttttgctgtaacataattgtttttaaaccaggcggcggcagtcgttatgattgtaaaaacggccgacccggcggcatacagcgtatctgcaagctggctgacctggtcctcctgaatattcagcggcgatttgccgaacatcagcaaagtttgattcaataaagcaagcaaaagaagcaccgtcctgacgaccgtgcctttgtccgcgaatttcatatcggtttcccccttacttttgcagcagattgtacatgatggcgattgctccgccaatgacgcccgtgcagattgctgtcacgatcgctcctgtaatggtccgcttaatccatgttgtgttttcgtcaattttgttcagtttttcattcagcgtcatgatttgctgatcctgccggtctgatacccgctctaatgcggctacccgctgttcaagcaccttttgttcacctttgatgtctgcgaattctttttgcaccgcttgttcatccagaagcacttccgctccctcctcttacattgttctcacctcccttcggaagcttcattcttaagaaaatgccgtgcctttgacagaaaggctcccgccggaaatgctcttgatttccatgacgatttccttaaagccggcaatatcaaatgaccacacttcttctgtgcctgacgtaccggcggctgatgtcccgtcatcagacctgattcctctgatcggcacattttttcccgagatggatctcccccaaaacgcgacatggcccgactcagccgtaccggtgatttcgacgagaagttttttccaagcgcctgctgagaagatgcttccctcgcccgcctctgctgcattttcatgaaaaatcacgtctgtatatgaaaacgccatatcaccgcccgtaccgacagattggtataaaacaaattcggactgcttttgatttccattttcaaaacggaaccggtaatatctttttgtcaggctgacccaccccgaagcggtcagcactccgccttttactgcgacaaaatgtgaagctgtccacgaattgttatcctcgctctcttcgataaaaagagttccgctgcggtccgaataagcccacccctgtgctctgtctattaagacggctcctaaacggtcttgtccgaattggctgtagacttcaatcgcttctagcggcgtattggtaagaagctctgccattccggacaaatcagcaaccggtgtgacataatcgtttttgttaccgcgataagcttttacggcgccgggcctgccaagttgatcggcgggaaattcaaatgaatgctttttcatcggccgtcctcctgttctcatttattaaaaatgacaaataaaaaaagccgtttggcttatgacacagcatttttatagttttcgtatgtttcacccgttatttcttgaaattcctcaggcgtgatatacttcgcggccaccccttcagccagatcttcggcagagcagtcatcatagcccatagcctgttttaccatttctgttgaggcccactcataaaacaaggcgtaaacccaaaagttaagttttttcatttttttcattctccttttacgtttaagagttccagttttaaagacgctaattgcctgccgagtgactgctgcgcttgttcggctgcttttctggccaatttctcattcgccagctgtccgccgaggcctgcaagctggtttgaatcgggagccgtatctttttttaagctctctttatatgcttcgtcagcggtttccacccattcttgtttctcttcatcaaaaaatgggcgccacatgccttcgccgtttatttccggcggaaagcccgcagcgttaggcggcatcacataatctcctgtctcagaatccggataaagctcaaccggagtgcctgtataaatgttgtcattgtcatacggaaatattaatttcatattctcgctcctttacgtgagtgccaaaacaaggtcaatataatagccgttcacgttattttctatattggccataattcccgtcagcttcatatctccattagaatagataataaatttgctgtaaccggtggtgccgctggctgcaaccatcgttacaacgcctttggccggcgcacaagaggatggcacactcccgaataccacttctctgtccgtaagaacgtgtccgttcaggtgaagggtgtttcccactttacggtattgaagcggcctgtctcctgatttagcgccatttttataaggaacatttatccaaggtacattctcagtatcaagttcagtaacgaggcgacgccagccctgccagcccaagttcaaatccaaatagttcgtgaacatattatttttataatcgacggcaatgacatacccaaacgttcctttcccctcactgtcaagagaggtaaaatgaaacatgccgcgggttgaagcgttgctcggactgtttgccgctttgccggttgaataaaaggtgccgaacgccctgccgtttttaacgattttttcaagaaagttatcatcatcaccaattgtcagaagatagccgccgttatcgtttgttattttcgaaagctgtgcgccgttccacatatctttatccgcctgtgtgacatgaatgtcttttttattggcgtgagcctctacttttgcttgagagcctgaatctgtttcttgttggctccattccgaccatacgcctttagtgctgaaacttcggacgtatatgggatttccggcggtcactgtgtctataaacatttggacaaaagtcggtgatgctccgcgggttctttgcatgacaattaattgtccgtattccgcaggcttattttctgtatgctgaactgatatatagtagatgccggacgtttttatattgtctaagtttgtttctgttaccgttttagcattcccgtcattgtcagtcagattgaataactgccctgcattccatttgtctttgtcagacttggttacatgaagatctgttttgtcggcatgctcatttacttttgcttgtgctccggcagctgtttcaaatggcatccattccgtccagatgccgtttttcagcgtttttctccaaaatcccccgtcatctgagaaagcggccgcctctccgttattctttgaagaataaaggtatataccctctgacggtttaggcggggtatttattccggttgcagctgctgagaaagtaaaggtcttattctggctggcagcggtctgatgaaaatcctgtccgtcagagatattaataaaagcggagccatcatcttttgtgattttagacaattgcccgttattccacttctggcgctcttctttcgtcacatgccggtccagatcttgattgtgccggtcaaaatctttctttgctgcctgctggacattgtccacgtttccgaggccgatttgcgcctttgtcgttttgtgcgggttgttcatgtcgtttttatgggccgccagatccgtgtgggcgttttttatgcctttttcccagcggttgacgtcatcttcattaatcggatcgtccggaagccagtctgttttttcttcgtaagccatcgttacaccacctcaaaggtaaatcttaaatcaagcgttctgttattgctgagatctaaatttgtttttcgttctgtaatgacgcttcctgtttcgtcaagcatctgcacggtttcaatgtgtttgacgtcttcttccctgcgtgtgagaacggtgactgcggcatcttttacggaaatgtccgcaatcggagtttctttgccgtttaacagcacttttgtgatcctgtttttcagatcggctgcggcacgctgtctgtaagcggctgatatcatggtaagaccacctcgttattgttgagtgtgacggaataaccgaccttcagttcactgacttttcggtatctccgattgttgagaatgacccggtctttgatttccagtgtttcgtttaatgcggctctcagtgtatacgccaaatgagcgggtttgattttttcaagcgtttcaatcagctcgttcatgtgctgcaggtcatcaagcccgatatcggcataaaaacgatactgccccggaaacatccgaacataagctgacggatgttttaaaaaacggtttagcgcctgctcgatcgcttgatgtgtgatgggcggaatattcgacatcttcgagatcagcctgagccgtctcatatcctccgtgtcacctgattcccgcggtatttttaatattttttcccagcggtcaagcccccatgtcgccgtcgtgataaagagctgatccgtcaaatcgaaaatatcgttattctgccgctcaaactcaggagcttccgccataagcagttgtgccatctcttttaatcgggttaaaaacggcgggaggtacgccgtcatctcatcgagtctgctcaaggattttcacctctttgagtttaggaatttccacgtcactgagcacgaggttttctgccgcaccgttcattttaatatcggcgtagtcactgacggatgccgagttataaacgatgttgttaatttgtgataaacggacggtgttttcttcaaaggccattttcttgaataaattcagtacgcctttttcaatctccgcttttacgtcatcgatcgagctgttcagctcaggcagcacggaagcggagatttcgatttccttccatactgcgctttccaccgttactgccgctccgatcggcgcctgtccttctccctgcccttcgtccggatcaatataatcctttacttttttgatcagaatatctgatgccggttccaaattcgcatttgtgatgacaactttcaccgttccgtctccgttccaaagcgggaagatttttgccctgccgacgccgtcaatctcttcggcccattgtttataatgctgtttatttgcgctgactgcctcccggcggacacgggtaaaatagcgcgcccttaagctgttgtcatcttcttcctcacggccgggaattaatatatcgcgcatgactgctttctcaagcccgggtatcgtatcaagcggcagcaggttctgccccgaaatgccggcattgcccgcttcaccggctgtttcacattcaagcgttccatccccgtatattgaaaatacaggttatcaacgaagaaacgggagcctggcggaatggtgatgcccgctgtgaattctccggctctgaccgctttagtggcaggtgttcgttcaattcccgcctcagcagcacgcctgtccagaaattcaccctgagccgtatcggaaaacacgagctccagcacggtatccagccaaatataagactttgcgagctcagcggccgcaggcgcgagcgcattgtaaatgacgctgccttctctcgtatcaatatccgccgtaacgcgcgccagcattctgtccataatgtcgtcaaacgtctgagcttcaaacatcctcacccagcacctcctctatctcaagcatgccctcatcagtttcaacggtaaaagagacgatgaaggcatcatcttttttctcaatctcaaaattggtaacggccaaaatacggtcatcatacagcaaggcttcttctatcagtcttggaatctccatttttttataagcatccgtcgtgttctgatctgaaagcacttcctgaagttcgtttccgatatcatggctgaaaaccgaatatgaataccgttctgtgtgaagagcgatatagacgaattgtctgattgcgtccagtccgtttatcagttcattggtaatccggttgttttcaaagtcaattcggtaggtttgtgaagtctcaacagcctcactcgcatcctccaaatcttcaaattcgatttccggtgtcagggccattgcacccgctccttttagatttgttcatgtaaaaaagccctcttcggcagatgaagcggctttaataggctgatattcccgtatatctccgtccggatgccggttaaattttgtccagtacaaagaaagactgtcctcctgttaaagcggcggtcatcacccgatctcccgcctggagctgatcatcttctccggatctcagccgcttcggcacaatgagtgcatcagacggaatcaaaagtttgtcgtgatctttcagtttcagctcgagcggcgaaacggaggtcacttcggccggcatcagctccaccggcgcttcagcgtcaaccgctccgacggctaaatgtttaatggcatcacttaatctcatcaggctgtcccctccggaagtgaatttttctccgtgacgtcaatcgtcatggtatgttttgttccttggaattcatggcggtccgtatctacataataggttttcttcagcccgatttccggaattgaaatatagacgggcaatccgctttccaacccaggaataccgatcgcctgtatatttttcagctctttcttaatgccttttttctcagcctgcttcacttttgcgcgctgtttcagctgggcttcgttaatgtcgtcagaaaccgtttcggtatactgcaaaacgccgaatgttttcatgccggcgctgtctgaggcggaagcctttatcgttttattgtctttttgcagccgcatgacgacacgggttgcggtgtcatcaattgaggtgctgtattgataccctgtaatattaactcctgtttccagcacccatatgtcagacggctccggccattcacgcaagccgagcctgcctttttctgaatagagctgataattgcgccccgtctggctttttgtctgctttaacgcttttagcatcatatcgtaaaggcttgtatcatttttaaaaacgagtgatttaatagtatggcctgtgttggcaatggatgtgacgggaatttgaaaatcgctggcgatcctttttaatatttgatcagcgcgcttgttggaaaacacgtaaacgtcctggtttttcacaaggtattggagcatatcgtatgcggtgaaggcgacggtatgctcatcgggcgttcttgcaaaaacaatgccgcggaacagctcttttccgttccatttgaacaaaaccgtatccccttctgatacgccgtaatacgtctggctgccctgctttacgacaatcgtcgcttcgatggagcggggcgcctgatatctgtgtccttccagcgttacgctttctgtgacaagctcgagccactccgtttcttttatgacaaatagttcaatcatcttttcacccgtttcattgcggtatcttcagcttctgccccgggaagatccaatgccccggctgccggatattccgtttgctgcgcttaatcatggcggttttattcgcgttccagattttccgccactccgtgtgttttccgtaaaacttgccggcgatgtcccaaagcgtatccccttttttgacggtatatgttttgggtgaagctttggacgggcgcttcgctttcgtttttttcttttgtttgatttttcttggcgaagcggttttatattctttcagtacgatatcaaaattccggtcgccgatttcattgtcaccttcgctgtaattaaagctttcaatgctgcatgtgacattgatttttgtccctgtaatcaaaaactgaacgggttttttcgctttcatccatgcttcaatggctgaaatggctttttccggtgaaggaatgctttgatattcggcaatcgggctgtaccgtttcggaaaaaaagaagagaacgaaatttctttcgctcccggttcttcgataaacgtcacctctccaagtccggtgactttcacggaatcattctgcacgctgtttgcgatatcaatcgcttcagggagaacgggaagccggagcttgtccttcccttgagacagccaaaattcgtaaacagatttagtcaaaagcaacggccccctttgctccggtataaatgtctttttgcagttcatcaatcagcgcctgtttgattttggcggctaggctctcggcgtcctgcccgttatggaaatgctgatcgccgctgaattcgattttaatttcttttgttcccgttttttgaacggtttggccgccgcctttaacggctgcggaaaccgtgccggctgaaagcgccgccggttccgtccgggacggatcggacacttccatgccgagcgcctgagccgctttttgcagcagataacggccgcggatgccccgctcttcagggatgatccactcccgtttgttcccttcgccgacacgggcgatctgctccttggtaatcagacccccattggcataaccgacgtaagggccgccatgagccatacttttaatcccggggacattgctgatcgagccgtatcggcttttaatatagccgatagcggcagcggcgttgtggattggatttctgatatcattcatgcccggcgctttgtgatcttcaaaggtgctcggaatcgtctgcataagcccctgtgacgggtgtccggctttggcgttgctgtcccatagattaatggaattagggttgccgcctgactcatgctgtgcgatcgtcattaatcccggaagccagctgatcggcgtattggttgctttcattgcggccaaaagccattctttgacgcttcctcccgctgcacccatgccggaaaaggctgctgcaagcgagcctgcctgtttttccgcatattttttcacgtcaactgagctgagacctttgacgacgccgactgaagcaaagcgtccgagactcatcatgacacgggaaggagagtgaatatcaagctcttccctgaatgcgtcctcgacttttttggccatatctttggccgcctgtttgacttcgcttccttttgcagtcatccctgatacgaagtgtccgatcaggcctgaccccagccgttcgcggaatctcttgattgaacaaacggtttattgatatgtgtgcttacgtattgcgacgttcccgtatcttttgcattctgtccggccgaataacctttcactgtggcggcgccccatgatgacgattgattaacctccgattgataaggtgttttcacctttgtttttaaaaacgaatcggtgcccgtcggcgatgtattctgacctttggcatagcccgcagcgacttgctttccgtaatcgggcgaagacgaaataagggcgttaaacggcgttccgatgtttttctctttccagccgtccatatccaccgctttattgctgattccgctgtcaaagccttcagtaaactgtttgccgagtgatgaagccgtccccgcaaatccggaagcatccacagacgcagcggccgatacagacgccgaagaagaaacaccgcccgctcccgccggcacagcggaagactgagccgaagccgcgcccatatcatcgacaacacgcatgccgagcttagacgcagcttgtgaaagcagcatcttcccgcggccgcgattgttgtcgacggggatgacaaattctttaccggcttcaccgatccaggaaatggtcggctttgtaatgtagccgcccgtggcgtttttgtccgtttttttctttttatctccgccgcctcctgtgacaaagtccattacgcctgaaatcaatttgccgccggttttatcccaaatctttttcacccagtcgaatgctgcagaaaaagcatctgatatggctgttcccacttttacaagaggttcttttatatgtttctcaaaccagccgcttaaccctttccatatatcctttaccgtatctaaagcagtcgtgaaagcgtctgatattccttttccgactttttccaccatgtttttcaccgggttccagacaatatccatgaaccagccggataccgtactgaaaacagatttaattttatcccaagctcctgtgattttactccaaatggacgtcgctactccgacgacagccgattttacgggctcccagacagtgctcataaaccagccggatactgtgctgaagacaccttgaatcgtcgtccacgcattcacgatatttgaccatatgcttgtcgccactccggcgacagctgatgaaaccggcgtccatacattctccatgaaccaggatgacaccgtgctgaaaatcccttgaatcgtcgtccatgcattcacgatatttgaccagatgcttgtcgccactccggcgacagctgatgaaaccggcgtccatacattttccatgaaccaggatgaaacgcttccccaagtatcttgtactgttgtccaagcactttgcgccgcttcggaaatatcattccatgtgtctttcaaagcccctgaatcaaaggcctctcccaagctggaaccgcctaaactgccggcgatgccgcctaccgcgccgccgattaatgtgcccactccgggaacaacgctgccgattgccgctccggccgcggctcctgcaagaccgccgcctgctgagccgaccttctctcctgcattatctttattgatgccggctaaatcagtaagtgataacaattcacctatgccgggaattcctttagcggcaccttttaaccctttcataccgcctttcagcgcctttgaatctcctaagcctttcaaaagcccgccgatgcctttacctgccccttttgttttcggcgtgtttacggatgcctgtttgctttcctttacggaggaacctcttttcgaagatttattccgcccttcgactttactgcttttgcccctcgtcactccggtacagcagcagccgccccccaaagccccgccggtttttttggctgaccttcctgaagatttcggtgatggtcccgtgcgctgcggaccctttgtcagctcaggacgcttcgggctgttggtgccgccggcagaaaggctccccttactcttttcttttttcgtgccgcctcctaataatccgccgatattgagtttgcctaatttttcagcgattcctgaaaatattttttctattaattccccggctttttcgatgattttgtccgggctgaatttctcaaatttcttggcaatcttgctgacaattttatcaacaaatgcctcggctttttcgatgatcgcatcagggctgaacttgccgaactttttatcaatgcctccgaacagtgaggaagtaaactgctccactttttccagaatcttatccggattgagaaaatcgaatttctcagaaattcggtcaatcgtgtcatttacaaattgttcggcgcggtcgattagcttatcaggactgaatttaccgacaacgtcgtcgactttcttcataaacgaatcagtaaaatgatccagctctttcaatatggtctccggactgaatttgctgacaacgtcatcaacctttttcataaatgaatcagtgaatttatccagttctttcaatatggcttccggactgaatttactcacgaccccgtctacctttttcataaacgaatcagcgaatttgtccagctcggctaatatcgttgccgggctgaatttgctcgcgatttcgtccgcttttcccatgaataaggtcgtgaacttatccagctctgctaatatcgtctccgggctgaatttgcttgcaatctcgtccgctttccccatgaatgaggtcgtgaacttatccagctctgctaatatcgtctccgggctgaatttgcttgcaatctcgtccgcttttcccatgaatgacgtcgtgaacttgtccagttcggctaatatcgttgccgggctgaatttgctcgcaatctcgtccgctttccccatgaatgacgtcgtgaacttgtccagttcggctaatatcgttgccgggctgaatttgctcgcaatctcgtccgcttttcccatgaatgaggtcgtgaacttatccagctctgctaatatcgtctccgggctgaatttgcttgcaatctcgtccacttttcccatgaatgacgtcgtgaacttgtccagttcggctaatatcgttgccgggctgaatttgcttgcgatttcatccgctttccccatgaatgaggttgtgaacttgtccagctcggctaatatcgttgccgggctgaatttgcttgcgatttcatccgctttccccatgaatgaggtcgtgaacttgtccagctcggctaatatcgttgccgggctgaatttgcttgcgatttcatccactttccccatgaatgaggtcgtgaacttatccagctctgctaatattgtctccgggctgaatttgctcgcgatttcgtccgctttcttcataaagcttgcagcgaatttatccagttccgctatgattgtttccggataaaatttggatgcgatatcattgacttttttcatgaaggtgtctgcaatggagtcaagcattgaaaaatcatttttcggcgaagcaggagcagcagatgcagaagcttttccgacgtccggcatattcttttgcattgcagccagctgtgctgtcaccttttcgtttaacgataattgaatgacattgtttttccccgtcagcgaatcaatccccgctgaaattcggccgactgttttcatgacgtgatctatgacgcgtatagtgacagagtacccgttctttaacgcagattgcatgtagcgtttgatacgttccatggcaggagtcacttcgtctgacgcatacagtgaaacggtaaatcctttaaaaccggcagccagatcccgcaatctctcaaatgccgctgtcgcgctgtcttttgctcctattttaacggttaaagacgcaggcagacccgctaattgggcttgcaccttttgaatgacggcactggctccgtcttcagctgaaatagagatcatttgtgcgcccagctttcttttcatagagcgctggatgcggtcaattgttcttaaaacagatttactctctttgcgtatatcaatttcactttggcgttttgtcattttcctgtatttctcaagcgctctgaagccattttggattttccttattttctttgaaacccgatcttccaattcaaaacgggcggtcagctttgccatgatgtcgctccccctttcttcgcttgtttttcaagaatgtccagcttgtaaccgattaaaccgtacaacagcgccttaaaatgtctcggtgcttcatataactctttcagttctgatggagaataatgaagctcatgcatcgcgtaatagagatacacggcttccttattcccatcttttatcagttttttgcttcttgctccagatcttctaattcatcttcaaaaccattgatctcaatcgctttattcagccaatttgcatactcaccgccgactgaaagaacgcgttttgccacctcgaccggatctgccgttttgtaagcgtcgcggagctccttagaccggaaatcagggtaaatcgtagattcaaccgcgatccgcgcatagaagcgctggctgtctaagtcttttacgcggcctctgcccttcacatttttatatgtcgtgctttccttctccagttcgtcaatgcgctcagtcgtaatggctttaaaaataaaaggcacgatgtttccttttttatcgacaaaacgctttgaaagcggaacccggatctcctcagcctcgactgttttacccggcataaagaatgacagatcatatacttgttcgtttttttcgctcatgatgaaaactcccttactctttttttataaaaaaacaggcctataaaaggcctgtttcactcacaatgattctggttaaaacgtttcagaaagcttttccggcacatcgaaatcttcaaaggtaaacggcacttcttcttcgagggcttctgagtctacgtccagtccggcgatttttgcagaatcaaagttgacgtcatacagggtgacgcgttctgttccgcggcctgatgatttgtcgtcaagaacggcttgcagcgtaaaatacgggtcgctgccttttttgacgtaatccatcataaggacggcgaatttggatgtgaccttatagaatgttgccgtgcccgttccgttggcgcctgttgttttatgtcccgtcatgcggcggcccatgatgtttacttctgatttgtttttttccacgtttgcttcaaaggttttaatatgcgccatctcttctccgtcgagaaataaacggccttcttttcctgaaatcgtgttttgcgcttttaatgccatcttagtttacctccacattaaagtagaatttttctgccgcatccacaggctgtacggcgagatcgattaaaaagccgtcgcggtcttcattcagcccgattgtaatgtctttgtctgaatcaaagttagcgatgccgcccgcatcctggagcgttgtcaaatattgaataatcatcgttttgacgaattgaaggccgtcatttgtcgcaggaagatcgcttccggtgccttttttcgatttaattaaggctttcagttcacgtgtcaaatcgttattcaccgcatcaagcacacggacgattttgtttttcgcgaactttttgtttttctctgccgtaaatgtcaccaatgagttgatatctttttcaacgctgactgacttatcacgggcatcataagagaaaaggaattcacctttggaaagacgttcgatcacttcatcatgagtcaagcggtgcagcacatcgacggcgccttcgtattcaacgaatgttaaggattgattaaatgcggcgctggcacttgcgcctgccacccaggcggtcgcatcttcagctttaatctcagttccgtcttccagcagcacaccttcagtcacattgataatgccttcataatccccgctgtaatgggcggtcaccccttgcactttctgtccctgcgcatcgcgaaggcgtttaatgaatgcggcaaatgtcgctttcagctgatcgttttccgcgacaggaagagcgatgacatcgaaattctccgtttcagccgcagctaaaaaatccgtatagtctgagttgaccggtgctttatcagttcctcccgcgagacggatgcctgcctgcgggtttaacgtttccccggattcttcctcagtgcctgtcagcgggatggaagccgacagttcgcccgttcccgtaaatgtgacatagccgtttgcttttaattcttcggcttttttcaccgtttgtttgtcaacttccgcttcatccatgtaagtggtcacatcgaaagcggtctgatcaaggacgttttcactgatgcggatgatgatgtcatttccttttgaacccccgtacaaagcggttgctttaacaccttgcgaaagatctgcgctcgctctgattccctctgtcagacggtacatcaaaacggtttttgctttctttttcgcctcacgaagcagaatcagtgacggatcttcaatactgagccccacttttttattcaaatcctcaacgcttgaaatggaaacgaatgttttcgcttccccccagccggatgcgacgggaagggcgacaatcccgcgttcaccgatcgatacccgctcctgggcggttgttttaaagttaaaatagattccggcacgttctttttcttttccttgcgtaaatgttccgccgttcattattgcatgacctccttggttaaaaatgcttcaatgtaagacttggcttgcgcttttgtcatttgtttttgcttcacgccgaataaagcaccctggagaatctcgggttttacgccgaaaagctccttcgcgtgctttgttaaatccgccgtgtcataaagaaccgctcgttccgccgttgcggcgtttttctttttatattgtttcacttttgtttcaccccgctgttaatgtccacatcccgcagtgcgggagatgtttgtttttgatagtagtagcggctcgtccagcggatggtgatcactgcctcgcctttgtctccgactcttgtttcgatacggctgatgcggacgaaatcaccggtatcctcccctgattccgtaagcagcggaatcagctgtcttgattctctcaccgcatcggcgatcccgtcggctgcatagagggcctgcaccgagtcggcatggaacagcttcacattcagactgtatgtcttcttaaaggtggagactgtgtcattctcgtcaaaagcatacgggggcgggatgtaaagtgacggcacctgaaattgttcaggcagttcattttcatatacgggcacgccgcactgctgatacaaaaaagcggcgattgaaccggtctcgcgattcatccgatatctccccccaacgtgttaagccactgattgaaacgcttgtccagcgattcggcgaagagtgtttcatacaaaagaagggctttgtcccaaaacccatttccgctgatccactgttttttgagcgccattcccgttgaagctgacggatcatagatgaaccgggagccttgaaaatacccgggcacccatctgacattttcatctgagacggtccaatgtccgtcatttatgaatgaggcatactctacattggtgccgatttcaagggtcagtcccccgttttcaatgatccatacgtgatcctgcgctcctttccggaaagaagacagcaggctttctgtatcaatcccgcccgaatgaataagctcctcccgtaccaagtcgagaaaatcctctcctgactgttccagccattcgcctgcctgacgggcaaattctccggatgatgccttttgcagcgaccgattccattgttcaaggttttttatgctcatagtctgtcatctctcacagcgataacctcccaatggtgctgtcttgttttcttcggcatttccagaatatacgcctgtccttcccaaatgattttgtcattgacacgcacaacggcctctttcggaaaatgaacgagaaaccgctgatataccttatgatcaggctcaagctgaataagctgctgctgtttttcaacaaacagacacggcacgtcttcataatcgggcacttccggataagaaaagacaggctggagcttttcggcgggaatcccgaagcgtccggccttcggaactgacaccgtctcatgataaatatcgcatctgtcagtgagcagccgttcgtagctcataaaggtctcacctttgcgtgtgcagaaaccggagaataacccggcgcgatatattcacagagcagatggtgcaccgccggttttctgattccgccttcacctgccaccgtatacgagtagtcgcctatcttttcagattgataggcggaagcggctgcttcattctggttgatcagcgcaaaatattgagaaagctttaataacgcaagcttaatcttttcgggaagcggtgagtaaacagggtcagtgaacgaatgccccgccattctggccgcctccgcctccgcctccagaatgtcctgtataagaagcggctccggcctgtttttgacttgatcataaactgaatatgaaacaacgtcagacggctgaattaacataactgccacccccgtcttattctttaacgtttacgattttggcgcttgcatcttcttcttcaaatttgctgtcaagtttagccgtcagtacgataataaatttgcggctgcgaatatctttatctacttcgattcggatatttcttgaaaaaccgagaatgatatttttcgggtgagtcaaaatgatgtcagacgcatcgtactgggaatcaccttctccgactgagtacggctgcagattggacactcctttgaccggaacgccgaatgctgaagacaaaccgccctgcaccgcaagatctcccagattggtctgacggtcagccacacggtctttccattcaatctccatgccttgagatgtgtaaaatctgaattcctgaggcagtcgcaaatattttgccggaatggcttttaagccttttttaaatgtggctctggacagctcttccccgtttccgtcaatgacgtgagatacagtctgcttacggattccgtcaagctgtgccaagtacggatcagaagaagatgtatcgccgtttacgactagctcctcaatatcgactgccgcccgctccgccaaaatctgcatgatcgtctgctgcaggccgtctttttcaatattgttttcaagcgtgtcataggtgatattaatttccgcaatgacttctttcgtattcagctgcaccgtacttgttgacgggacggtcagctgatcgtcagttaaggcttttccttcctcagcggcacgcagaatacgctggccgaaaccgattttttcaaatttctgcgagtcattttccatttgaatcacacgcgattcgctgaaaatggtcggcgtgttctgcaccatgcggataaatgctgaagcttgtgcggggttcattaaaccgccgctttttaaagcggaaagtgacatttccgcctttctgatgatatcttgatttctcactctacagttcctccttctgactgggcttaaagcagtccgctccaaatggattttttaacaggctcttgaccgcccgtctcttcttccggctgctttgatgcgcctcttactttttcaagcgcttcaatgcgtttaataatcggcgccagcatgtcctcaacaagtgttttcagcttttcttcatcagacggcgcagccgccccgtctttgtcttccgtgttctggtccaaactgtcaagccgctttaaaagcgggtgcagcgcgtgttcaatcgattctcttacgtcttcttttctcatcttgttcaagtcctctcccttgcggtttcttgatttgcggtcacggtcgagaaattgcttgactgcgccgaataagccggcttgcttttctgccggctcttcgtaaacgtcagcggttcccgccatgctgtagcccgtaatgataccggctttaatctgatcccatacttcatcggaagctttggtgacaagcacccaagatcctttccggatcacagcattcccgatttcaaagtcatccggggcgacgtacgactccaccacctcgccggtcccgccttcaaaattatgatttgtatcgatgttgcgggcgtccgccaaaaaaccgtgagcggccttttcaatctcttcagccgtcatataatcgccatgtgcatcggggacatccggctcgtaaacgatgccgtaaacaagcttctgctcatccgattcgttttttgtaaacacctgcacctttttttcaaatgacggaaggcctccggctgattttgtaaaaaagaattccgtttggttcgccgccttatcgacatagctcacaaaactgatgacggcatttctcaattctctcggcacgagatgttttcaccccctttcaggattgctcctatttccctttcagcaccggccggctgtagtactcttcaggccattcctcaagcgtcttgccgagcactcttcccgccagatcacggaggtcattaggagagaccgcgccggcggaaataaatggcgtaagcaccttcgcaatttcaagcggatcgcgaaaatcaggcccttttaatgtgagctgtacatcgtggagacccagttcaggcaaaaataacgtgttgagcttattaatcagcgttttccgctccggctgaaacacctgctcctccgttattttccgtgccgtatcggctgtggctttgttgtattcctgcgcctctcccgtataaagcggcgggagacggaaagcggaacggagtttatttctgcttctgtcgtcatattcaagaaacagcgcatcatcctgcagaatttccgcaagtgatttaatttccacagacacgggcgtaatgtcttcgcctccgtgaaggtctttttccttcgcaatgccttccgcctcaatcagcagaaatttgtgggcgttttccaccccttccaggtcattcatataatcctgaagctctttgtacgaggtttctgacagcatgccgttttcaaccgtaatggcggccggcacgtgacggccctgcttgaaatacataaaattcagttcttccgctttccgggcgccgtacagattgacgatattgccgacccagcgcggaatgccgtaagtgccgctgccgatttttaagtgaatggcttcatttgcccggtattcttcagacagggtctttacgtattcaccggttctcatgtccatcatgcggggatcgccgtattccttaaaaaacactttccgtccgttcagcatctgaacatatttacggaaccgtttttgccttttaatcgttttggatgcgccgttttcttcatatgaaaatgtaacttcaacgggatcagtcacaccgcagacgcgcatatgtttcacatccagatattcaatccccgccggttttcccgcgccgtcccgaagcacttcgagaaaaccgttgcccgttttttcgcggtcttctatcgcatatccgaggaccgtctcggccgattcatcaaaatgaagacatttgtaaaagctctccagcttcatccagtttttttcggcccgggcctttttagacggtgagcaatctgggctatttacatcaaaggtatattccacatcgaacccaaaacccgtaatattgacccgatacgcgtcaatgcactgctgaagaatcgtcgagtattcggcgattgttttcagttcaatgagattatagggcggtgaaatgatgtcttcgccgtacagatcggcaaattgatcttcgttcatctgccttgcctgcggcgcggccatttttgatttaaagacggtggctctaacgttttgatagttaggcaacgcctatctcctcctttcccgattcggacgtctccgtttttgtgatgcatctttcagatccgccgcgtcatagtcatccagcgcataccaaatggctgaaagtgtgtggggatcaattgaaaactcatcttccgacagaacgccgtttttgttttttgcgtacgttaagttctgcaattcgcggatcgtattttcacagctgtctgagcaatagatatgtttgaaccgtttcagcttttttgtatactgaagtcttgagcccggaaactttttggccgcaaccatgcaaaatccctgcctgcggaaatattggatgcttttcggctcagccgaatccgctttgatcagctctttttgatccgccaattcttgaagctcctcagctgtctgatcatcggtcattttgtttttgtaatactcccagaaaatataaagctctttttgatccggatcgacggctagccggatgaccgcattgtatgactcttcaaaaccgaaatccatgccggtccgaaacagggggcgcctgatggacgcaatccgctccgttacttcgttgtgctccatgacctgaaactgcggaaacacgcggatgccgttgacgccgaaccgtcctttgcgggcgatccggtacaaatcaggatcgtaatgccgtaagctgtccagctgcttaatatagcttttcggcaaaaacagattatcgcacgctgtggaatggtggtaatacgtatctcccttaacgacggtgcctttttcatacagcgtctgatcatccaatacgaaccgttttttttggtcatcacgaaaaaaatgccggtacgtccaattggaggtgccgacgggatttgtggtgcatatcatatgcagcgaaagctcgggatgacgcagacggccgatcagctccttaaagccttcatacttcacttcagagcattcttcaatccaaatcagtgaaatatgatgaatggatttcaatttggccgggttgtccatccctttaaacataatccggcttccgtttgaaaatctgagctgcatcggtgaagaaacggcctttacggcatgtcccagttcaagctccgtgataatgtcttcaaataaggcaaacgtagaatccctgtgcgtatcgaaaacttcccgcacgacaagggccgtccgcttttcacgaagcagcttcaggatgattttcagcgcggtatgatagctttttgacgagccgtagcctccgacgagaaattggtacgtttcattccaattgaacaaataatcttcaaagcgcgggttgaccgctttttcaatcatggccgttcctctttccgcgtaatgacaatgtcaatcggcttttggctgtcttctgttttttccatcttctgctgtgccagctttaatttttcattttcgattttttgtttaaattggtcagggaaaaggtcaaagtacaaggacagcttttcaagagccttcatcttgtccgcaagctttattgcaatgccttctttcccgagttttgcttccgtgacgatggttccgtccagaaggtgcgaatctttaacgtcaacgtagctgatctcctgcataatcggattatcattctcgtcaaagagcggccctgattttccgaaggcctgaacctctttttttccgaaggttacataatcggtaatgtcagcgaaagcgattttcacatagacttgaagaacgtccatcgcttcgacaaacactttattgaccatttcctttttcatgcggctgatttctttagcgactttttcgttttttaacagcctgcttcccgtcacatgcgcgctttccggtgaatacccggcttttatcgcagattgggtggcgttaaagcatttcacataataaagacaaaacagccgctggcgttcgtttaactcatcaccttcgcccgggttgttttttccgccgctttccgcgttctttttaagcgcctcgtcccagcgcccttcttttttccatctgccgattgttcttgcggatacgcctgatttgccggcaagggcgcgatttgtgatgcggcctttatgagactgatagattgtaaatgcctgttctctttttgcgtttttcatgctacggcatcaccgccacctccgacatgattgtctataataaaaagcggcttctaatcgggccgctttttgtgatcgtctgttcacttctaggtggcaaacgtatgacaacttatgaagcaggcgattgatttctttgttcctgctgtttttgaattttcagaagcgcccgtttgaccgtcgtttgtacggttgatttctttacattcagcaaggcggcgatccgttcatacgaaaagcattccgctttgtggagcagcagcatttctttttctctatccgttaaaacggctaatgcgtcccgcagtctgattctgtcttcttcagtcacatttgcggacggttcaaacatcagcgcctgcgaataggtttctatgattctcggatctttaatgagcattctctgataagcgtctctgcggtctatcgctcttcttatgccgggctgccggcctttttcaagccattcgatgacatattccaaatctgtaataatcgttctgatgatttttttatctttcagttcttctgaagtaaacaccgtttcatccgctgcctccagctgcttgtaccactttttcgtctctttcagcgtgcgtttatattcaaatagtaagtcttccatgtagatcctcctctttttcggaacaaaaaaggacaccaatcaatgcgcagcatgtgcgcgattgatcagtgtccgcaggctttccgtcttggacgtattctgtttttttcgattaattcaatttaaagccgatttcatattcgacccgggccagatccccttttcgcgtttcgacaagcgttttgccgtgctccggcgcttcggcgagccatgcttccttcttcagtccgtctactataatcacccgaaccttgccttcttccagctggctttttaatgttgtatgttcaatgtcagtcagttttttaggattcatgttttacttcctccatctttttcaaaatgttcacttcatgtatgaggcttccgagctcatttatgaacgcttctttttcttcagaactttctccccggagcaggcggagagccgtttcggccgcctcaaagagttccggggctttcgccatcaatgccgcgttgatctgctgtgagtatgaacttaagttgaaaacggccgcgatgagccttccgtttgaataagggaacttctctttatccgcttcgctgtaagcggaataaatgtaaatgggtttttcttctccgctgtgtacggcccgccatggagcggggctgtttttttcttgcaatggtgatcctcactttccatcagcctcatgccatgcttcaatttgcttttctatccgttttgccctgaacagcaggcaaaaaagccatttgatatatttacacacgtgcatcaagcctcgcttttgcgtcttgaaccattcgttcaagccgtttaatgaccggcgttaaatcagtgcctgttttgcagttcgggcaagggtgaaagacagcgccgaaacccgtttccatcacaatgaccttcttcggcccgcacagcttacacattatctcgccccctctaatctgtggtttacgtcaaatgaattgccattaatgatgactaaataatcgctgcacatctcataaattcttgtgcccaaggcttcatcaacctgcaccaatccgtcacaggccagctcgctcgagataagaaccggcttatgatttaaatagcggtaattcacgacggcgtacatttgttcaatctgccaatcggtcgcccggggttttccgttcagcggtttgaacagatcgtcaataaaaagcacatccgcctgtttcatacggccaagctttgcatcgagcagatcaaaatcattttttaaatccgtaaagccctccacaaaaggaaaatacagcaccggtgtctgcttctgtctcatgacataattgctgagagcggtcaaaagatgggtttttcccgatcccggacgccctaaaagggcaatgctgtttttccggcagtttttcatcttgtcgaagttctcaacatattcaagggcgcactcatatgcgtcgacgactgcctgaggcttgccccgcgtgataaatcctttgaaatccagcttccgaaaggcatctgtaatctcacttgcgccgagaatgcgttctactttccgttcggcggcgcagcggcacttaacccatacttccattcccagctggtttttgagataaccgccctgatctttacagagcgggcagtcaaagcggcttttgtctgattcttccggtctgtccgccagtaatggacgttttccgtttttcaggtcggcaagaatctgctcgatcgttcgttttgtcatgtatcgtattcctctctttttttgttgtgattgtccttcccgcaattcgtgcattcaagcggtcttccataaacttggcgcaatagctgaaagccttgatcgtttcagctgaagaggtgcgccgctgttcaaaagcggtaaagcattcgccgagccatttgattgcttcttgtgctgacgcaccgagggaaacaatacgggcgatggcctgataatcccggggcgacgggtatacgctccgcccctcctgtgcagaccttaatctgataaaatgggcagcaatgtcgttaatcgcttcttcagcagtatgattttttgttatatctatttctctccggacatttttgtcccggtgatccgccgatattgtccggtcagttgcttccgggcgggttaatgtctttttcggcgtgaatcttttcgagtgctttacggagacgatgagtccgtaaggggcgcggacggttttgatatactcatgctgttccaagctctcgagccaccgcctgacggttttttcgctgaccgcgaatacatcggccatttctcttgcttttacgggcttatgtccgaggacgatcccccactttacgccgtcttttacatgttcctttgtcgttgagctgatgaaccataaaaacagccaaatggcggaccctattttgtcataatgttctgaattcaataatccagaatagatgaaaaacgggtagcttttacgtttcataagggacatctccatttttcttcagacctatatagcgttcatactgcaatcggttatcaaatcggaataccggtagtccgcaagcggtaaaagatatcgaaccgcctgcttttcctaaacatctctggtcagccggattgctgctgaaacggatgattatcggctgcatctctcaccctcctgatcaatttcttatcgtattttgatacattttgtatccctatgatgttgattatatacgatacatttcgtatcatcaagacctttttgatactttttttatcatctctttcttttgatacattttgtatctataatcataagtaacttagggtgttgaaaaaagagaggtcatttcggatgataggcggaagattaaagagtctcagaggtaagaaaacgcaggaagaagtcgcaaatcatatcggtgtctcgcgcgccagatattctcattatgaaaacggccgatctgaacccgattacgacacgctgcaaaagcttgcggattatttcaaagtgtcgactgattatttgttaaccggaaaagaaccttcagatgaagacatgtttgccgatcccgacctgcagatcgcatatcgggacatgcaggacttttccccggaaagcaagcagcaggccattgaattcattaattatttaaaagaaaaagagaaaaaccgcaggccgaaacataaataatccgctcttttcctttaaactgcttaacgttcagccgatataaaagctgaatgtttatttttaaaagaaaagggaattgattcaaagtccgatcagggcttttctttctcgcttaaaaaagaacatatgttcgaaagggtgtattcaattgggcgattttttaacacatcttgaggaatacgtcaaaaacttatattgccgcatgggaatgaccgcccctctccatattgatatgcagatgattgccaaggagcttgacatttggattcattttgaagatacgcacagtatgatgctgaagcgggacggcatgtacagcatcgtcctgaatcaaaaaaagtcacccgaagagcaatggcaggattttgcgcacgaactgtgccatgtgctgaagcataccgggaaccattttcatatgaacaagctgttcagggaactgcaggaatttcaggccaaccattttatgtaccacttctgtgtgccgacctttatgctgttaaacatggagctgccccagcggaggagccacgccgttattttaatcgcagccgctttccgggtgacggcatcatttgcggaaaaaaggctcgagctgtttgaacggcgtaaagcaggtattcaatttcagaagcggctcgcttgtctgttatccgacaagcggccgaatgtgtattatggaagcggacagacacacttgcatgccgctgaagaaaaaacgccgtattttattgaaaattagcgattctccgccggcttagaacacagccggcagaatgtcatcattttgacatcggagaaaaggtttttgcatcatgacgctgtaatcaccgtgctgcccgccaagcacttcatgcgccgcatagctccagtgaatgtaagaacgggccccctgttcatttatcataaaaaccggccttcacggtttctacataccgaaaaaacagatcggttggcgtgtatttttctccccggcagccaaaattgctgaacagcgcgtgtctctgcgccgtgctcacttccaattgcagccccattttcctttttgtccgattgacaatgttgccgggatttaaccctgccagccgatcattcttctctgtcagctcggcatcaaatcccgcttcacgcagcagatcacaaatcagtcttgctttttccagatccgcgcccccgacgagtgtatttgcctttttcagatcatgatacccgtgaaaagccaatgcgtaatgatgggcggtcactttttctaaagccagaggctcgtcaaagcgtgtgcttgtcaagtggagagaacggttatcgcaccgcttcgtcccttcaaataaataaattgagctttggtcagaaaatgcatgcaccagctcactgacacccggctcaatcctgccgccgtggggagcgaggacgatacatttacttccctctttttcttcataaataattctgtattccgattcagcagcggaaagggctgcgaaattgtcatatctatctttcatgtgtaacatgctctccttttccagtcagcaccagtttactctactcatctgggaatggaaacctttttatagtatgatttgatagaatacgtatcagggaggagatatcatggggttcatcaacggattgctgggcaatgcgtcgacaatatcgacggctgaagcaaaatcagaactggcccgtattttgctggaaggcgagaatgtcaatgccgcatttaagcttgtccgagatatcattgtctttacggataagcgtcttattcttgttgataaacagggactcacggggaagaaaacggagattcaatccattccgtacaagagcatttccagattcagcgtagaaaccgccggccgctttgaccttgattcagagctgaaaatttggatttcaggcgcggaacttcccgctgtctcaaagcagtttaaaaaagatgaaagcatttatgatattcaaaaggcccttgccgcagtttgtatgtaagaagaaacggaagcccggggagcttccgttttcttgattacagtttttcttcaattttcgccttcgttttcgggccgtaaattccgtctgccgttaatccgctgacggattgaaaacgttttacggcatttgccgttttcgggccgtaaacgccgtccgccccatgattttttgctcctttatcgggataaaaataaagtgcggataaagcgttttgcacttgttttacgtttgtccctttcgtcagcggtttcgtcactttgatcacaccggatggaagcggatatgaagacacagcctgactttttgaagaagaacccgtctgagcgagcttgatcacttgtccgactgtaatgtgattcggatcggtgatatggttgatgctttgcagcgattttacgctgacaccgtgcgatgcggcgatttccgataaggtgtcgccttttttcacatggtattcagacgcggaagaagaaatagaggcttttttcgccggcatacttccgcttaatttcttttcaatcttcgccttcacttcatcccagcggccttcagacaaaatgcggtgcgggcagtactttccgttccagtcctgatgctttctgattctgtcaatcccccagccccgttctttcaaaagctgcgccgcaaacgcaatcgccagttcttctgcggctctgtaccgttcgccgcctgacttgctgtaacagatttctatagcaatcgacttgcggtttccggtaccgttcgtgccgtctcccgaatgccaggcattccggtccaacggaattccctggatcacttctttgtcatcaaccgcaaaatgatagctcgttgattcgctgtttcccgtcatatagctgatttcattagcggcggatgcgtcgtttgccgtgttatgaatggtaatatactccggcgtcatcggattcggacattttaacgcatatttatcagccgatacgagccgttttttcacttcaatccccactcttcatctctccttatgcctttttcatcaataggtggcattcgtaggacagataacttgagcatatcgaccctgcattcggataaaattggaatggacacgcatgcaaaaaataagacccttccaaagaagggtctttatgttatgtttggttgcgtgcggcaatatggaatgtgccgtccgcttggttttccaaatggctttcatggccgatcacctgtgtaaagctgaacccgacagcaacaagcagcaatcctgacaacagtttagatttcatatagacaatctcctctctggatttgtttttgggcgtgcaccattttttcataaaacgtgagcgctttttcaggctgtccgtgtttcatgtaaaatttggcagcgtcatgcgccaattcttccacatacggatacaacatgtgttcttccagaaaatcaaacgtgtgcctgacggatgcgttatccatttccttgccgtataacgcatgcaaaaattggaacagattgacaaacaattcatcattgtattcgcgggcgatactgagcccgaggcgatattgcttctctgcttcggctgtagtgttctgtttataaagaacctgtgttaatgagtaaatagaatgcggaagattatcgaacttttctgacctgcaaatggaaacggatgtctcaaaatattcggctgctttagagaggtctcccattttttcgtaacagtttccgagattatataaggctgaactgataagacggggattgccttcttgttttgcaagatctaaagcaagttctaagtggggcaatgctctttctggatactgcatgtcatcataattccctgcaataacgaattcacattggattctgcggacgttgtacgtctcatacgattggtacgtttcaagggcttgaacggcataactcatggagacgtaggtttgtttcaggttgtaaaaaatctcggccattttaaaagcaaactcagctttctcgatgtcatcagaaacgagtgcaaggtttttttcagcccgtttgtaatacatcatggcgtttaggaacattttctgtttaaattcgtacattcctcgaaaaaaattaaagtagtaatcaagcagtcctgtcagtttatactggttgccttcaatgtcttccaataattctgaaaactcaggctgagaagggtcctcctttaagggcttgatgtaatccagcatgacgcggtgtctgaattccattaatgaataatacagcagcagatcctgatcttcttccatatcctcaatctctctctctacttcacgtttgacgcgctccgcctcaaggacgtgaaactgccggatatgggtataccattcattaattttgagcccgacaaaagaggacggaatagtctgcttcatcctcaataaatccccccttttggaatgaccgagatatgtcatattttatcataattgctagaaaaagaagaacgcaaaaagaccgcaattgtcgaatttcggatatccgcaacgatttatctccatcacaagcttattgcttgtttcttccgtgccgttgatatagcatatccttgcagcttttattctgtattaaatgggggttttcacatgacagcacaaaatcaattggtcagccactttctgtcacatcgaaacgtgacgattgagctggcggaaaaaatcagccgcgagcattacgactacaagccggcggagacatcaatgtccgctcaggaacttgtaaaacacatcgtttattcttttcttatgtttgcaaacgtcattaacgacggaaacgggtcagctatccagaacaaaccgaaagaagaagcggaaacagacctcgtcaaactggctgaagcatgtactgaaaaaacgacagacatcctgtcacagctgactgaagagcagctgaaccgcgaaattgacctgactgcctctttcggcagaaaaataaccggcgcggctctccttcagcttgccatggagcatgaaattcatcataaaggcaatcttttcgtgtatgtcagagaaatgggccacacggaacttccgttttatcagcaaaaatcataatccggccatcatccgccgatctgcgaaataacagcaggcaggcggattttttgttctgtataaaattttccgaaaatttaattgattaccgcctcttaatcatatataatctgataaaaatagtaggattattcaggaggcacacagatgactgtaagcattgtgtttatgggtttctttgtcggaacgctggtcggattgacgggtgtggggggagcggcgcttttgactcctttactgatcgttttggggatcaacccctcaatcgccgtcggcactgaccttttatataattccatcaccaaactgttcggtgtcgtttctcattggaagcagcgcaccgttcaatttaaacttgtcggctacttggcgctcgggagcattcccagcgcaacagccgccatcggtattcttcacttgtttcccgcttttcaccagcatcaggagcagattatcaaacaggcgctcggctacgtgctgacccttgtcgccatttccattatcgcccgcctttttttcgataaaaaactgcggccgaaccgctggcagcaaaaaacacttgaagaaaagcggacactcatgatactgatcggcgtcattttcggcttcatcgtcggcctgacatctattgggtccggctcattatttgcgatcgccatgttatacctgttcagaatgaaaacagcagaagtggtgggaacggatatcgcacatgcctttttgctcgtaactgttgccggtctgttaaacgcaagcttcggaagcgtcgattacctgcttgtattgaatctgttgatcggctctgtgccgggtgtgcttctcggcagcttcttttcgccgaaattctcaccgcgcccgctgcagtttgtgatggcggcgattattttaatcagcgggataaaattaatctaaaaaaagcgtcctttacaggatcgcttttttatttgggaaatcccctcaatccaaagccaatggggtgggaatttctttattaactaaccttaaaagtgcatataattgtccggttttccctaacatcataccaagtcccgaatgatcatttcttattccattttgccagccatttttcaacagggtctctttaaaatggttaacccatatattaattgtattctcaatctcttgcttgcgatttttaaagagagataattccttaatagcgtgaagtacatctatattccccatcgttccatggcataatgagtagccctgacgatgggaatttccattcagcaatgtgtcatctaaagactcattaatatacccaacgtgaatgcgcccgtctacattctcgtatatcctgcttcttccaagaagaataccgcaagacccgtgacaccacattgcggaagaataatccgactcattttttctgttatccctccatttttttattttagtatcaaaaaatttatcttcgtatttgagagctgattcaatcagtctaagtacttctccagatgcctcaatatgcgcataatattcagatagtgcataacaaatcccagtaataccgtgagaaaaccctgctaaaacaacattctcatccgcgtcggatttccaatatgcttcatttctattttgaatcattcttttgcatatttctttacaaactgcccttgccgtatcttccattaattcagtccgataatacctgccaagctgaatcacaacctttaatatacctgcgagtccgcctataaaatcggtatgtgttatttgagcggtttcctgacgaagtttctctaagtatgctttacacatactattcacttcattttccgaataaagtccggtacctctcattttattgacaaaatagatataagaacttgacccgtaaaaagcagagaaatttgttttataaatactatgctcatatatttgattaattgaattcactattttacgaagaatcgatttgactttttcatcattataaataaaatcataagctgaaaaataaagccccactccagctaacccatcgtacagcccaaaactcaacggtcctacggataaggtgccattgggagccgagactattgatacccattgaagatatttctccgattcgattgcttgttttaatatacaatctgtttctatttgaatcagctctttgatttgtatgtcattttttaaatatccaggtacaaaatcatcaatttgatttttataaataatatccaaattagccgccgtggagcttaaggccatatttatcaagctcacttgctgatgcatgtcttcttccgacatattcgctaaacgagttaaaacttcttgtttagcgctttgtttcataatccctgtatccaccacatgtattgaatttgaataaacccttttttcactaataggagcattaaaatagggtatatcaccgatcatcatatccttgatctcaaatggactgatggaatcaaatacttcatattttgtataagcatccttaataaaagataaaacccttatcctttctccataatcttttaaatacataggatggaggagggtttcaagaaatgaagcgtaaacatatgtaggtctgacaataattctaataggggcataatttaattcgcttataaggttccgtatatataaatcttctttcaaaatcaagaatattcttttgaagccttcaataaattctctttcaaattcaaaacattctgctactttatttttgtaaacaggaagattccttccccttttgaagagatattgtttctttcttatagaaattttatctgtttttatatgaagcacttcttctttttcacctttttgattttctgtgtttatcaagcctcctatattagtcagcccattatcttccggaaaactcatatagttaaaaagtgcagattttaatattgttttatttacctgtgctgatgccattaaattaacattttccttgttctcctcagaaaaaaagaggctgctttgaaacagagtctcaagatcaaccaacactggtttatcacgacatgctatgatattttcaaaatgaaaatctgacccttgaaaagcataaataaatcctaaatgcattccaaattggtaataataatttcttacctgttcaatattatcgcacggttcagactgtacatactcttgccacccgtactcaccttgatccaaggataaaggtgtttttaaattagtttgataatactgattgacataatcaatgaccttttcataaaaaacatcaatttcaagtgaacggggtttataaacgagtttgttattctcaaattcaataataacaacacttttaccgccattatgaacatcccctgcattcatattaacctttctcatttttccgaacgaaaagttgaatttttgttggatttttttatagtcattaacccaatgtttaataatagatatagtgaagcgtataaaatcagaggtggatctggagattaaatcttgcaatacaggataattattgagtatttcttcaacaaatgcggagtttttcagcctttctgagaatatatcataatttttagattcatttttttcatcaaactcgtcaaaagtttgatgaaactcatggataagtgttttccccgccaaatagtatatttttttcttataattaattaatatcgattcaacaagacatcccttatccaacagactttcggatggtattctatctatttctttaacaatctgagctttaaaaatacttatataatactgcgcaaaaccttcgaaataatcctcttctttaaaaatattcaacatagagttttcataaacatagttagccgaattctgtgttttgttcacaattatcacttccttatatattcttgactgtctttgacaaaaaagaaaaagaatatgtacgcatatacatattctttttcggatatgtttaatcgttacatggactgacaatggacgcacactttgtcgtcggacagcctgctaaagagattggtattgtgatggttgtcggcgttacggtcatcggggttgcatctgaaccccctgcaaggttttttaattcttcttcagtcattggagtcagtgcttgaaaatcttttttcatgttaattcctcctattgtttgagttttttataaatttcagtcgttacatggactgacaatagacgcacatttagttgtcggacagcctgctaaagagattggtattgtgatggttgtcggtgttacagtcattggagttgcctccgagcccccgccaattcttttaattcttcctcagtcattagttccaatgctaaaaattcttttttcattaaaaatccccccgattgttttttatacttgcctttgcggacatgcgcagcctactgtgatagttggacaaacatgatttgttattggaattgttgttattgatactgagttttgccctccaataagctctcttaattcttgctctgatgtttcatacaacgcgctgaagttctctttcatattccatatttcacctcctttcaagttaataagtctgctggagctgtgattcatatttggtcttaatcgtctttaagtttccattttcaatctcgtagacagattcggagaattcgagccattcggttctatgagtaatagaaattacagtgatatcctttttgtaaatgttatttaatatatttaattctgtatccttatccaaattgcttgttccttcatctataaatagaattcgcggatttttcgctaatactctggctattgagattctctgccgctgtccacctgataaggtaataccattttctccaatcatggtatgatacccataggcatttttataatatcctcatgaatacatgcttcttttgcagcttgtacaacttcttccattgttattttttcattgaaatattttatattatttataatagtgtcattaaacagattgacatcttgaacaatataacctaacgtttctctcagcttaaccatattaacgtcctcgattttgaattcaccgtagcaaatttctcctgctgttttttgataaaggccggcaatgattttaatcaaagtagactttccgcttccagtttttccaattaatgtgattttttctctcggccggatcattaaatttatattattcaaaatataatcgtttccgttgtagctgaaatcaatatttttcaagctgatattatgagcggccgggttaaatagttcaatgcttttatcatttacttcctcatctttttcatccagtacagcctcaaccctgtctaccatttcttcaactaatttaatagactctaaactgccgataattgatcccagcggagacataaaccgtccggcaatgttagaaaaagcaattactgcgcctagcgtaaggcctatagatactgctgaccaagtacccacaattaaaataagtaatggcaaagatagattgattgcattggagaccgcacccagtaaagatgaataattcattcttttagagaaataatctaactgatgattaaagttataatttaattggctctcaatattcctggtttctcctattgtttttataaatgtcattgatcttaagatttcgattagctggctctgaaaattggattgactatttacttcctgttttgtgaacatttcaattttcggaagcaaaattttagtactcatcacctgtatagctgctcccaataaaactataaaagataatatcggagaataaacaaacatgactatgaaaaatacaaatataagactgatatctaatatcaaagtagacgctaacctggaaatgacttcacgaattacagcaatgttatggattctagttgaaatatccccggcagtattcgcctcaaaaaactttaatggaagactaaatattttatgaattattttatcagtcatactcttattaatttttaattgcagtttgataataaatttcattctgattaaggacagactaaagaataatacgattgaaacaattacaatcatgaaaagcattggtatgggaagaattttctcatttccgtcaataaatgaatcaataatatattgagtcaaaaaaggggtcattaagtttaatgcttgaaaaataaaagtgaaacttataataacccccaacaattttttatctttcaaaagatattttccgatctttctaaatgaagacacatcttttaacgacgaagcagtcttatcctttctctcaagttcgttctttctgattaacataatagaaatgccattatagaaggttttgaactcttctaatgtgattgtcagtctgccagacgaagggtctataattttaacgttatctgtgccaaatgcgtcgacaactacaaaatgattatgattccaatgaacaattagcggatggtttttatttaactctttaagctgcgttatattgtctgtgcggaatgctttgaaatcataatcgaatgtttcagaaatccttttcatttctattaaatcagtgccgtctcttccgataatttctttatttaatttcaatttgttaggattgatttttattccctcagccctgctcaaaaccatggctaaacaagtaataccgcaatcaaattgatttctttgaagaataaccggaagctttctttttctaattttcataaatgtctcctaatgtatctacacgtcctatttcaagattgagaatattcggcaattctgcgtctgctgcatacagcattccatatacgatccccgctaaaccaagcattaaattaggtgtttcaacatcccttccaactccgcattggtagaaacctatatttttgtcttgtacactctccaaaatcaagttttttcctatatttacaaattgactttcaccagtcttttttccatattcgatcagtattaaagcatttcccatgtctccgtgacaaagactttgctctcggccaaaaccgtcataaaaaatgttagaaacggttttattcagatcttttttggccacttcggcaatatcagggtgttttgaatctttcaattctaatctgcttaatagaattccaggggatccatggcaccatgcagatgttgcagcttcatttaccgtttttctcagatcaagccagttaccgtttactttttttgaattttcaaaagcaagtccttttcggatgtacatacttatatcttgatgttttgaatgtttctcgagtaattgaagggcatatatcattccagcgtttccatgggaaaaacccgttaacggcttatttgcaataccttcccaagtgacaaaatcctcatcaagaaagatcgcttgtttcattaaaaatgaaccgcattgttcagccaatgataaaaagaatgtatcattctctatttcaaacgaacgtatcattacaataagagccctgctgtgcccccgattatatccaattctttatcataaggaagcaaggacggaataagctgagcgatttgttttgcattctgtttatatttttcgcgtttagtatacatatagaaattcattaaagtatatactattgaagacactccggaaaaagcacctacagacatactgctgtcttcgtccggtttcacctcaatatcaataaaacgagagatgacatctttcataattttttcggcaatgtccagatacttttcttttttcgtgacgcgccataaagccaggtaggtgaaagccatcccggaaagcccgtcgtaaaaggtatcacccataacggataagttccattgaatttcatcaactccaataggagtagcgttaagccaagaatacgaacttcctttatctgtgtgtgctttgtaagattgattataaatataagcggccaattcctctgctttttctattaagatactttcttggttactactgaaaacatttacatattgtcctggttcttttgttataaattctttcaaaacaatttgccgatcatcctccgaagcaagcattgacagttcgataacatagagctgaaactttaaatcgtcttttgataaatttgaaattctttcttttacactttgagctggtgtttccggaaagtaattttcaattttcttattttttgagcttagtaagtctttctcattcaatttcactttgaaataaggtatatcattattaattaaatcgttgaactcatatttaacaatagattgatattcatcttcttgctttggtctctcccatatttttgataagaaaatttctctatcaatagagttgtgtaaaaatctaggatgaaaacttaattctaataaagcagaatactttattgtcggttttgatataaaccgaacatatatcttgttttcgctcttttctattatgcgaatcagctccgaagcatgttttaatatagtcatatatgcttttgaaaaaccttgcttcagttcttcgacataatcttttgcatatacaaatttattctcaagcatagggtgattattagctgtatcaatttcgacatagtctcgtttgacagacatttctgctgtctttaaattgataagctgaggaactttaatgatcgactttgctttccctttccgacctattccgctgatgtcggctttgcccgcaaagaaaaaaggaagcagccctaatgctctgacagattcatgaagctgcgtttcagctttttcataagcgtccatcccatcctttttttctggtatgcaggatgaaataaggattccaaatcaatgagaactggatagctgccgttggcaatgagattttccgaatgaaaatcaacagctttcaatgcatataacaaaccgatttgagctcctgtacgctgataaaagttttgaacatcttttaaacaattgcatgctttaaaagatataaattcagtccatccatatccgtctctgctaaggacattcggagtgctcaattttatatcatgatctctaattttctcattcaaaaattcaattatctttttatataatagatcaatttctaaacttctcggcttataaataagtttaccttcatttaatgttattttagtaacctttctcccatcagaatgagaatcacccatccctacttcaatgtcccttattttgacttgttctgaaaaaccaaataaagagagcagttcaggcttgtccttttcaaaacgggagataaattccagtatgaattttttgaattttctcagttcatttccaatcgctcttaataagactggatatcgttggaaaaagttttcaagatactcctgactgcacaaaagagttttattataatcaccatatttttctttaggagtctcccctgccaaaaaacctttttcccgattcatattcatatccaatacaagtgttctataggatacttttaaaatgattttttctaattgatttgaaatactatgatgaaaaagagccggttgttccagcagatagtcataagaaggaaactttgattttttaagtagatcattgaagtaagaggacacttttaacgcaaaaacgtgaaacatgatttcttcatttacgtcttcttttttaatagcttggtgagcgatccctttttttaggttttcgaaaacatgaactgtaaaagcggatttatgtagtggggtttgatataagcttttcactttatcaattgattgaatggataacacattataaatgctttcctgggccatttgaatatcattcttatagattagttctaagtttcgatcaaacagtttctcattttcatcaaattgagagacagcagcttttttttctttacttaatagaatattagttagcgaattcatttaatattcatctcctttaaaaaaagagggagacagctggatctcccagagcattggaaatctattttcttatttcgggttgttttaacaccagcaagtgtgagtaggacaaagaccgcattcccaagttaacgtacaaagcttaccatcatttccttgagaaatccctcgctgttctgcgcctcctcctccgctgaattcacttaaagaaatttcctcaagttcttctcttaaatcaccggcaaaacgatacattttctcattcattaatattcctccccttgatttttgaaatatattggattttgatccatatatttctataaacctatgataaacgatcttttacctataggcaccgaaaagtcatattcggaaaagcgctttttttttgcgcgtttccgaagtataggttataaagaaaatcgggattaactgttccgttaatcccgattcatttactcatatatagttttcatagaaattaatgaatatcgatttgctttgatcagtgcctctgttctggattttactccgagcttgttgtacacaccagtaagaatgtattcaaccgctctttgactgatcaacagctttgctgataattcccggtttgtcattccctccgctacgcccgctaagatatcttgttctctttcatttaaagtaatatctcttattctatcttcaagcttatcaatgttgaacgtatttgcttctgttcttcttaattgtttaaagagatgagtaggaataatggtatctccctcaatgacactttcaattacttttatcatatgttcttctgttgatgacttacttatgaacccggaaacaccaacttcaaccaaaagattgaaatgcacagagatatcaaaaccagtataaattataattttttgatcggggctctctctaagaatcatttttgacaattccattccatttaactccggcatatataaatcaagtaaaattaagtcatactcataatgcttaaggtgattaagtacttctttacagcaagacaatattgttactcccattttattgcttttttcaagaatggcttttgtcccttgagcaacaccaatatgatcatcaattaatagaatctttatcatgtcagcgctccctattcatttttcgtacttatttcaaaccttaacagcaatccttcatttacgcttgaagatatattatgaataccattcatacaatttatccgctcttttatccctgtcagcccaaaactgtttgtttttgaatttactttattccaatcaatgccgattccattatcttcgtaaacaaacataagacttgtttttttttgaatcatcgtcaaaacaatataactggcttttgaatgttttacagcattagtaagcagttcttgaacaatccggtaaatgtttattgtgatatcttctgtaaaaatagaatcatcttttacatctacaaagaattcaatatcaagctgatagttgcttttatgtttatcaatcaggacttgaatgcttcgaagaagtcccatctccattaaaaaaggtggtcttaaatcaaaacatttttctcttatatactggatattgtccagcaaaatttctcttatgtaataaatatccttgtatttctcaacatgatactctaattctctgcatacaaatatcagctcttgaatgatagagtcatgaatatcctgtgcaagcttggttctctctatttctgaaattgaaaataaaaccttagaaagtacagccgacttacatttatgttgatcgtctatgataatttcatcaatttttttttgaatcaataatttgttctgaagtgcagatgctgtgcagaatgccagcattcgcagccaatctgcctcgttttcacgaatctttatagggtgtccttcatgtgataaatgaataaaaacaaatgtatcacacttctccccgataaacagaattgatccgctggcggtttcacgtatttctcctatcttaaaatttgaaatgtttatgttaggaacttgaatgtttttttctctcaattttaatgtttttttgtcatagtttataagagcaatctgctttcctgagagcacactctgtatttcattggttagttcttttatcaattgatctgcatcggatcccttttgacataattctgaaaaacggaacaggctgcgaagatatgtcttatttctgtcatcataggtaaagcataaacaactactgccgaatatacttagaacaaaaaatagactatactgtttaaactgtaattggctgtctgttataagcaaaagcataaaaaacaataataaggagaaaacaaaagcccttgcaaactgctcaatattaagcttcacccaattatctttcatttgtatccaagccccttactaaggaaaataagggaatccctttgaatccccttaaaatgaaaaagttactttacacttattaaaatataaacagcaaaggcaacaatgtataccagaaatgatccagtcataaattttacaggttttcttgaaaagtttagtacgcctcttaatccgtcattcaaaatcattccgaaaaaggtaaccagtgtaactcctaaagcgagcattgaaatcacaaaaataacttgctccatgtatactcatcctccatttacattctgttttttttcgaatatacgtataatcctgataaggataccaaaacatacagccccataatcagtaatccccaaactaaaagaattgaattggtatatcccatatcactttcagaaatttgaatactgaaacgataaataaaagaaaaaggaaagactattgagacatcacttgctaacagtatcgtcattattaaaaaggaagctacaccggttatcatgacaaccactagatttttacttaagaaagcaattaaagctgcaatcggaatggttagcaggctcaaagtagtagaagtaaaagatgtcgctattaatcttaataagtcgcttgctgagatatcttcccgaaaaaagaaaaacaaggtggataagtgaataatatgattaacagctgagattaaaaacaaaaatagaaaagctgcagctagctttgataatatcaatttgaatttatgatacggatatgacatccaattcaacattgtcctgtttttaaattctaaataaaaataaaaacctgaaaaaataaaaataatagtcggaaataggatcgaatactgattaaaaacaaacatataaaatttgttccaatctgtattttcgttcatagtcaaaagaccgattccgtttatgagaaatggcaaaaagcttagaaagaaaataacataaattgatttcagtcttttaagtttcagaaactcgttacgcactaacagactcatgacctttctcctttgccagcagttttaaataaagatcttccaaagatagcttaaatccgtcaatagacgccttgttaaatccccaagaatttaatttctctttcatttccgacggatgaattattgaaataaactcgaattgctgtttattctttgaaataacatgatccgcaaatttctcaatatccgcccaattaatacccgcttcagctggaattttgtacaaataaagatgttgcgtatttttcataaaggctgactcgaaaataatctgccccttattcataataagcaattcatcggccatgagattaatctcacttaaaaggtgacttgaaataacgactgtggttccatttttcattacctcttggatcaacatttcacgtacttctttaataccatatggatctaaaccgttcgtcggctcatccagcaaaagcaatgcaggagcatgcgcaactgctctggcaattcccagcctctgtttcattcctaatgaagtttgcgaaaacagcttatctttatgttcaaaaagtccaacctttcctaaaatctcatttatttcttcatcagaagctgatttttttaaatagttaagatgtaatttaatattctcaaaaagattcaaattttcataaaagccaggaaattctataatgcttcctatagactgaatcacatcattatttggatttccatataagtcatccccctcaaaaatcacttcacctgaagttggaggaaatatccctaacagaactttaagcaatgtcgtttttcctgcaccgttgggacctaataaaccatatattttacctttttccaatgttaaatttatatcatgtaaaatttctttcttttttatagaaacattgatacccttggatattaaagctggatcagcctttcccacttttcatcattcctctccgtcttgttctgtttataatataaacttacgaggttaaaaagaagatatagtcaaggttaatttacgtttaaatttctcaatataaaaaatacgtgaagcctctacggcttcacgtattcattgctgtttggataaataataaaaaccgttccgttttgattgctctttattttatgttcaagccccatttgtttaagcatcatattaatgatcgataagccgatcccggcgccttttctttcagatttataattcattcccgggcccctatcctcaattatgattacgggtttgttttcaattagctttgtctgtacggaaacgtattttcctgaatgagcatggcgcaaaacattttgaaaaatgttatcaagaattctcttcagccaagtctcgtctatttcccatacgatgttttccttcagatcaatatctattgtgaagtgctctttctcaaaaattggataccaagctgttaacgaagaacgtattatctttaatatgtcacaactctttttatgaagcggcaatttacctgcggcaagaagagaaaatgatgacaaattgtcaatcagttcgcccataaacgttattttatcgtttatgatgcctaaagaatgctttccattttcactgcttatttcattcttcaacgtaaatgtatgccctcttataaccgtaagaggggtccttaaatcatgagataaatcagcaatcaagttttttcggatttcgccttcttcacgctctttttgtctgctgttccttagttcctcaaccatctggttgaatgaatattccacttgacccagttcatccttctgtttaactgttacaaattccggtatgccgtcattatcttgttttttcatatgattccccaaagaaattaaccttttttgtattttcgcaaaaaacatccatgaattaatcacaaaaagtgaacagacaaaaatcaaggcgataaaccatatataggaatacttggccctcataacctcccattgagatcctataattgagcgcggagtttctaaaaatgcatatccgctgtcttcactcccatttacataagcactcagcaataaatatttcttttggttttgttccatcaatttaatcaattcgctaacgtgaataacctcaccctttttggccaaccgttctgagttcgaaaacatcacctttcccttatcatttatccatacaatatcagagtgtttatattgcttcatgtgcgggaaagcagacgtaatttcccgattggatttccctgaaaaaccttccacatcagacttccaatcactttccaacttgtttggttcatagtgtacttgcccctggtgatcaatcaagtatgttaatgtgacatagtaaagaaaattcacacctaaaaaggctatcggaaaaaacaaaattgaggcaacgatattaataaggtattttgttgataatttcattgtttaatcctgtatccaatccctctgatcgtttcaagaatttccggctcatttggattgatctcgattttttgccgtaaatgcctgatatgtaccatcaacgtcttatccccttcgatataaggctgctcccaaatattttcataaatttgttcctttgttaatatttgattgggatgtctaagcaaaagcaaaaaaatccttaactgcttatcagttaaaaatatttcctcatgactttgatgatttaaaattcttttttctttcaagtggacacttaagtgttttagcttcaattcatgaatggcagtcttgtcaaatcttcttaataatacttcgattcgagcggccagttcatcgggatgaaagggttttgtcacgtaatcatccgcaaatcctaagcctttcagtttatcttccagacccgttctcgctgttaaaagcaagagcgggatctgcggatgtgtttttttcatcctttgaccgattgtaaatccatctaaaccgggcatcattatatcaagcacgatcagatcagccttttctatatatgtttcgtaattataggaagaagtgagccatataatcatatagccccgatcttctaaatcatcctttacaaattggccaatttcttggtcatcttcaatgtataaaatgttattcattaggaccccctctgaaatatgtgactaaaaaccaatcttccataataattatatatattataaaaatctcctttatgtaaggcaccattccattattatagctcatagatattcacaattcatcaaggggcaaaacgataagtgaatgcgaaaaggcggtctgttgtcagatcgccttttcccttataacgtcacaccggacttaaagattgcaagctcccgaaaatcgtttttttcgttattgacgtattctccgcttgcaactttaataatgtattgaataaaatctctcacaatgtgatcttctgttgtttggtcttccgccaatctgcccgcattgtaatcaatccaatgaggttttgattgaaataaatcggtatttgttgatactttcacagtcgggacaaatgtgccgaacggcgtgcctcttccggttgtaaacaacacgatgtgacagcccgccgcagcgagcgctgaagaagcgattaaatcattgccgggcgcactgagcagtgtcaatccctttgttttcagtgtttcaccgtatgtcagcacatcagaaaccggtgcaagaccggctttttgggtgcagccgagcgacttgtcttcgagcgttgaaatgccgccttccttattccctggtgacgggttttcataaatcggctgctcgtgcttcataaaatattgcttgaaatcattgatcaatcggactgttttatgaaacacttcttcactcaccgcacgctgcatgagaatcgtctcagcgccgaacatctcaggcacctccgttaagaccgtactccctccctgtgcaatcaagtaatctgaaaatcttcctaataaagggtttgcggtgatgccggaaaaaccgtccgacccgccgcatttcaatccgatgctcaattctgacaggggaatctcctcacgtttatctccctttgccgcaaggtgtatctctttaagaagcgctgtccccgcttcaatttcatctgtgacagcctgtgattcgagaaatttcacccgatctccgttcacttcagaaagcgtttccttaattgccgccagctcattattttcacagcctagccctaaaaccagcacaccgcccgcatttggatggcgaatggcgttaatcagcatttgtttcgtattctcatgatcatcgccaagctgggagcagccgtattggtgctttaaaaccagcacattgtcaaagggggcaatgtctttcgcctcttttacgaagcgctgcaggattttctcagcgacgccgtttacgcagccgactgtaggcacgatccacagttcattccggacgccggatgtaccgttttctcttttgtagcctttaaatgtccggttctcatttgtaaaaggattgtcctcgaagcgcggtgaatacgtgtattcttgcacatcggataaattcgtttgcagattatgggtatgaatatgctcgccggccgaaatccgccttgtcgcacgcccgattgaaaaaccgtatttaatgatgctgccgttttcttcaatggtttgcagcgcgattttatgcccccgctttacagggtccttcacttcaatcgccagtccgtctgtatacagccgctcccctttgttaaaatggcgcatagcgagaagcacgttatcgtttttatggatttttatgacctctttcatttcacttccccccttattgccgcagcattcatgtaacgcatgcttcatcccccgcttatgaatgacagagagaaaaaaagccgttcgttcagtcagccccggaagatggttcagattctttccccacaatcgctcttctcctaatatagaaaatgccgcttgaaacatatcatctttgcaacgggaccgcgccatttgaaaacggttcagaacctcctcgccatctgccggtttgttcagcccgttccagtatgaatagatcatggcgctgaatgaaaataccagcctctcaggaagccggccctcctgttcgatataagccttcagcgtcggcaggtttcttgttttgaatttcgcggcggcgttaagggtgatgctttgcagataatgttggatataagggtttttaaaccggtgtaacacatctgccgcatactgggtgacaccctccatttgcagcacgggaaggatttcttcattgatcagctcttcgatgaatctgcccgtcacctcgtgctcagccgcttcccggacggttagcagtccgtataataaagccactggcgccaatgccgtatgagcgccgtttaagattctcaccttttttgtcctgtaaggcgtaaggtcagacgtgatcagtgcgttcagcccggcatcagcaaaaggaagctcattctgaagctgttccggcccttctatcacccacaaataataatgctcaccgaccacaagcagacggtcttcgtatccgagaaaatcggtaagttcttccgcggtatcaacaggaaatcccggaacaatccgatccacgagggtattgcagaagatgttcgcatcatgaatccattgagtaaaatcaggctccagctcccacagcccggcatattgaagcacggcagccttcagtttccgtccgttttcttcgaccagttcacatggaagcacaatgcaccctttctcggcgtcacccgcaaatgccttatagcggaaataaaggaacgccgctaatttcccggggaatgttttttgaggcctatcctcaagccggtcgcctttctcaaacgtgattcccgcttctgtcgtattggagatgataaaacgaagatcctcttgtgctgccagccgtttaaaggaatcatagtcagaaaaaagatcaatgccgcggctgatggatttgacgatcgtgtgttcttcagccggttttccgtcctttatcccccgcaaaaaaagcgtaaacaaaccgtcctgttcgtttaaacgttttattttctcagagcctctcggctgtacggcgacaacgcttccgttaaaatccgtcaattgattcaattgatcgatctgccagtcagcgaaggcccgcaaaaagttgccttcgccgaactgaaggactttttcaggatattgaatgtattttccgcacatctttttattcagctgccgcaagctgtccgcctccttatatttatgcacacgttaacattctcccgtacaaaaacccggataatcagacgggccgttatgtgagttttttaattgaatctcttatcatcacctcggtgttttcgtatattttttccgccgccgtatccgggtcggtgataagcgccaaaattttctctgcgccgagtatgctgattttttcaaccgggcgttttactgtcgaaagcctcggcgtcatgtattgggaaatgccgatgtcatcaaacccgataacggaaatatcttccggaacgttcaggcctttggcgaaaatggtattcatcgccccgatcgccatatcatcgtttgaacaaaaaacagccgtaggcggtgattgaagcgccaaaagtttttccatcgcctgactgccgctttccatatcatagcggccttttacactgtattcatgcttaatcgggatagaatgatcaattaaagatgtcaaatagccttctttccgctgagaagctgacctgaatccttcctttccctcaatgatcgcgatatctctgtgtccgtttgcgatcaggcagtcgaccgcctgtctggagccttctttatcgtttgacaggatattcgtgatgctccggtcatcaatgtcccggttcagcacgacgagcgggatgtttttctcgcggatatgataaataaatgaattatcactgtcgctttggctcattaaaatgattccgtcatatctcatgggcgtaatggtttcaaagcttttcagatcgtcaatcgcgcggacgaacaaattgtattcctcactgattgtgcggtttacacctttgatggtatcggaaaaaaagctgtgtgaggttccgtttgtgatgcttgtaaaaaacagtccgatcgtatgggacttttgcatggcaaggctttttgcatttacattcggtgtgtaattcagctgtgaagcgagctctaatattttctgttttgtatgctctttaatgtaggggctgccgttaagtgcccgggatacggttgtgtgggatacgttggcgagttttgcgatatcttttatggttaccatcgtttttcctttctttctgtatgctgtcatttatttctattgtaccattaacggacagtccataaaatcactaaagttgaggttttgcatgatgtaagtcctgaacgagctcgtcatgctgccggtccgtcagtttatacattaaaccgataatcagcatggcgcacgctaaagcgaaagccgggtacagcagcagaagccctttaatcccgattaacgtgccttttgtctgagacgcattcgggatatagccgataacgctcagcccgatgcctgaaagaaaacctgataaagattgggcgagttttctggagaagttgaaaagcgaatatgtcgtcgcctccttccgttcacccgtcttccactctccgtaatcaataatgtccgacacaagcgcccacgtaatgccgtttggtatactgatcccgataaaagcaatgctcgctaacgccgtaaagatatatacatttgacgggagacagaaattcagcgcatcagccgcggcgctgacggcaaaaccgatcatcaccgtttgcttttttccgaagcgtttgacgagtttcggcataaacaacacacctaaaaatgaagagccgatgatgataaaactcatgtaggacatcagctccgcattgttgagattgtattgggcgaagtaaacaagcatagcggatttaatgttgtatgccgatattgagaaaatcgtcatgaaaacgacagtcagaagcggtttgttgccgataaagcatttgaaaaccgacatgacggacagcttttctttcggcgcttcacggacgataattctttctttgcagtttcggtagcagatcataaatcccgcgattccgattacggccatcattcccatgactgccgggtagccgatgtgaacgttatcaaaatgaacgagaatcgggatgacgatgacacttgtaatgagcagcgcgccgagagagccgatctggcggaatgcggaaagcgccgttctgtcctccgcatcctgtgtaatggctgcaccgagggagccgtacggaatattgacgaaagaataagcgaccccccacagcatgtaagaagcataggcgtacacaagcttccaggtgacactcacgtccggtgacacaaaaatcaatacggtcatgaccgcaagaataatacttccgaataataagtacggcctgaatttcccccggggtccgatcttttttctgtagtcaatggccgagccgacaatcggatcagtcaaagccgcaaacagcttgctgaccaaaaaaatactgccggcgaacgctgccggaatgcctgcgacatctgtgaaaaacttcagcaaatagatctgcccgagatcaaacataaatccgttcccaaaatctccgaaaccataggatactttttctttcagactcagcttatgctccttcacttttgcggcaggtgctgtcacgacaggcacattactcataggccacctctttcattccattttttaaaagcggaaatattcctcagcattccggtaacaaattccctcgacaatcctccctaaaagctccatatcgcagggcgcttcgccttgttccgcccagccgccgatcagcgtgcagacaagccgcctgaagtattcatggcggggataggacaggaaacttcttgaatccgtcagcatcccgataaaccggctgaacaggcctgtgtttgataacgctttcatttgttgaagcattccatctttcgtgtcattgaaccaccaggctgtgccgaattgaattttccccggtgttttcccatcctgaaagctgttgatcatgctggcgataatatagttgtcattcggattcagagaatacaaaatcgttttaggcaattgccactttttttcggcggaatctaacagccgggcaagcggttttgcgatacattcatcattaatcgagtcatatcccgtatcaggaccgaggctgctgaacttatttgtattggtatttcttaacgcgttaatatggaactgcatcgcccagtccagttcggcgtaaagaccgcaaagatattgcagcgtccgtgttttgaatttcttttcatcttcaaaagacacatgctctccgcttaatccggcggcaaaaatccgggccgcttcctcttcggtcgtctcggcataaaccatttgatctaatgcgtgatccgacactcttcccccggcattgtgaaaaaagcggacgcgggattccaacgcatccaaatacgattggtaggtggtgacagccattccggaagcgctctccagcgaccggacccaatcggcaaaacccgggctgctgatgtccagacctttgtcaggccgaaatccgggcagcacttgaaccggaaaatcactttctttcaacatttcatggtatgtcagcgcatcggcaggatcatcggttgtgcaaatgactttgacatttgatttcagaatgagatcccttgcgccaaacccgtctccctgcaggagctcattcgtatttttccaaattgccgcggccgttttttcattcaatacgtcataaatgccgaaccagcgctgcagctctaaatgcgtccagctgtacagcggattgcctatcgccatcggcaccgtttttgcccaggcgaaaaacttctcttcatctgaagcgtttccggtaatgcagcgctcttcaatgccgttggccctcatgatccgccacttgtagtgatcaccgtaaagccatgcctccgtaatggttgtgaaggttttattttcatagatttcctttgggcttaagtgacagtgataatcaatgatcggcatgttttcagcgtattcccggtacagcattacggccgttttactatccagtaaaaagtcatcacccataaaagctttcacactctcatcctccctcttaaaaaatgttaacgttaacaaaatggttcttttttattttagcttcctctttctcacatatcaatcatttttattttatttttcagaaaattgtatctattaacatttttatgcaaaaaaaagacattgccgagaaaagtccggcaatgtcttctgtatgatcttaaggattagtaagcgaggctgaataatcctttgatatgtgttaaataacgtacgttacttgcttctttcattaaagatgccggaaggcctttcagcggagtagagttcgctccgatgatggcaaccgcgtctttacgtccgaggcttgcaagcgtaccagagtttacaggcttgaatgtttcaagcgtttttccttctaagtaagcgaacaggttgtaaccgacaagttcacccatctgccaagcgatttgcgctgtcggcgggtacggacggccgtccggcgcaaagtatacagcgctgtctccgacaacgaatacatcttcgtgagaagtagattgtaagaaatcgttaaccgtcgcacggccgcggttcacttcaaggccggattcgccgactaacgggttgccttgtacgccgcctgtccatacaaatgtgttggcaacgacttttgaaccgtctttcagatcaataacgtttccttcaacatttgtaacaggaagacctgttaagaactcaacgccgcgtttttcaagactttttgtcgcgcgttcgataaggtcatcaggaagaacaggaagaattttcggacctgcttctactaatttcagtttgatttctttcgggtctacgccgtattttttcgtaaggttcggcatgatgtcagcaagctcaccgacaagctcgacgcctgttaagccgccgccgccgataaggatcgttgcatcagcttcgtttttcgttttagagtattcacgcacacggtcttccacgtgtttgtatactttgttggcatcagcagcagatttcagcaccatgctgttttcttcgagtccaggaatgccgaaataagccgtaacagaaccaagtccgacaacaagcgcgtcataagtcagcttagaaccgtcagaaagggcaacttctttcttatcaactgagaaagaattgacttctgcgattttaatgtcaacgtcttttcctttcagaagtttttccagcggcatagcaacagcctgttcagacacgttgccggctgcaaggcggtgcagttccgtaatgatttggtgagtcgggtatttgttcacaacggttacgcgtgcttcatctttactgtaatgtttgcgaacggttaaagcagaaagaactccgccgtaaccagcgcctaaaatgacaatatgttttgacatcgtatatcctccgtcctttatatcaatttgaatctgagattatttttgtttttcgttcatgatttcaagatagctgttagcaaaacggaacagcttttgagcttgaggatctttcagcatgcgcagcaggccgaaaagtccgatcgtttcattgcttgcatccgcgcggtcttttgcttcgatggcagtagccgcaacttctttcgctgtttctttcaccggctcaagaatttctgtaagcgcacccactgtatcgctcttcaatacttcgtctgtcgctacagactgtgcaaaatcataagacttcgttaaaatatttactaactcagtcagttttggaagctgatccactaaaacagtcagtgattcttgaacttcaggttttagcagctgatcaataagatcgcgttggccttggctgacagatgcatttgtttgatcgattgtttctggcatatccgattctcctttactataagcagtatgctgattttttttggaaagggtagcctttcccccttcatgcagaaaagcatgaaaaagcaagattgtgaattcatgcacaatcatttacaaaaataaatgtttactacccagtttttcactttgccatatccagtattatttttatatcaacaaaaacaattgaataagtcaaaatttctttttcctctctgaaaatagcaaacataaaaaaccccaatttgatttactcttatataataacactttttgaacaaaatttgaacgtgaattgtttcgtttatgaaattatttatatggcgggggtgtaataacgtttcttttaggctatttttttacagaccgtccgcttttcccctgtcatttttcccacaattctaaaagcgggcccgattttcccgtaaaggggtcacattccgggagcgggacacggctgatttcttctgaagttctatcatttttctccgtttttgtatcgtactgccggccgcccggataagccccgatcacggtaaaatcagaactgcccgacagttttttatgtccggtgcctgccggaatgaccgctgcgtctcccgtttgaagaacggcgtccgccccttgttccccgccgaacctcaaaaccgcggttccttttaccgcgacaagaacttcgtgcgtggtgctgtgaaaatgatgatacggaaatactccgcccgtccagctgttagaccaatcgtgccggcggaggacggactctgctttctgtaccgtttcttcattaaataccgctttataaataacaagcggaagattcgggttattcggaatgcggccgtcaccttcgaaataaagcacttgaatatcctctttctgcattgtgttcacctccgtatatgtctgtttcccattcatcatttattaaaacgctattttctcatattccattgcgaagcctgccggtgaatagtatagtataaaaaaatatgtgtcaaaatgagggatttaatgaaagccatcgtgatcggaatattggcatctctgttttttgcagtcacatttattttaaacagggcgatggagctttccggcggaagctggatgtggagctcttccctgcgttttctttttatgattccgtttttatttttgatcgtttatgcgaaaggaaaatgggcgccgctctggcatgaaatccggaaaaaaccgtttttttggctgaagtggagttttaccgggttcgtgcttttttatgccccgattacgtttgcggcggcatatgggcctggctggctgatcgccggcacgtggcagattacaattgtcgcgggtgtgcttctgtcgccgtttttctgcgaaacaaaaaattcaccggcgggcccggtttccgtcagacaaaagatcccgctgatttcgctggttacttccgtcatcatcctgatcggagccgggctgattcagcttcagcatgcgggttctctgtccggccgcacgatactattcagcgtggcgccggtcgtcgtcgcggcgtttgcctatccgctcggcaaccgcaaaatgctggaacaatacggcggaaaactcgatacgtttcagcgggtgctcggcatgacgctcgcaagccttccgttttggcttttgatcgccgctttcggctggtatagagacgggcttccctcaatgggacagacattccaatcctttatcgtcgcactcagctcgggcgttatcgcaacagtattatttttccgcgccaccgatatggtgaggaatgagccgcagaagctcgctgctgttgaagcgacgcagtccggagaggttctttttgcactgatcggcgaaatcgtctttttatccgcggcgtttccgtcacttctttcatttgccggactgttcattattattgcgggaatggtcatgcatacattcgcttcccggcagacagaccagaaaacggcggagcaaacgtcagccaatctcaccggttcctgattttttacgaaaggtgtcatcctatatgaaagaagaaattccggcaatatcttttctgtcagccggcaaacgctttgaacaaaacaatacgtcctttgatgtcctaagccgtgtaaccggacatatccaaaaaggttctatcacggcgttgatagggccttccggcgcgggaaaaagcacattgctgtcactttgcaatctgatgaatacacctgatgaaggggaagtgcttgtattcggaaaagaaataaggcgctgggatatcagggagctcagaaaaaccgcgggccttgcatttcaatcagctcccgtcacggagggcacggtgcgggacaaccttctgctcgcagaaaaactccacggggcgcagcactatacccctgaagagctcgcagattttacagaccttccgcgcgggcttctggatcggaatgcgaaagaattatccggaggtcagcggcagaaactctcattagcgcgaactctcgccggactgccgtccatcctactgctggatgaaatcacctcggcgctcgactcctcatccgttctcaccattgagaaactgattacgaaactccatcggcaaaaacagctgacaatcctgtggatcacccataaccttgaacaagcagaacgattatccgatacggtatggtttatggctgagggacggcttttagagaccgcggaaacgaaaacgttctttaaggaaccgaaacacgaaaaagcccgggcgcttttacaagggagcgggtgctgatatgaatgatctttcactgttactaacaagtatatttgtcattatcgctttattcctgtctaaatcttttaaagccggtgtcgaaaaggatatgatcgtcgcaaccgtcagggccgtcattcagcttctcatcatcggctatgtgctgtcgctgatttttcgcggtgatcacccgatatttatcatattaatggtgcttctcatgctcacggccgcttcgcacaatgtcgccaaacggaaaaaaatgcggatcggctcattttggcgcgtttttctgacactggcaatcgcggaaaccgtgacgcagggacttttactgacccttcacatcattccgttcacttcaagatatgtcattccgataagcggcatggtcatcggaaactccatggtgctctcaagtctgtttttaagccggctcagttcggaagcagacctgcggaaagaagaaatccagctgattctctctctcggaggaacgcctaagcaggccgtccggcagatattgacgtccagtatgaaactcagtatgatcccgacgctagaaagccagaaaacattgggtctcgttcagcttcccggcatgatgacggggcagattttagcgggggctgatccgatacaggcggtgcgctttcagctgctgatcgtttttacaacgatggcctccgctcttcttacatgcatcatactcagcgccttgacatatccttcccttttcacggaacactggcaattaaaaaaattcagcagggaagcgtaagcttttttccctgctgaatggtggtttatgacaaggtcagagattcatagtaacgggataattcaattatcatcgctcccatccgctcaatgtccggagcaaggaccctctttaccccttcatcccggatcgcttcagccgtcactttgccgactgcggcggcaagcacatgtttttcgaatgcctgctgcaattcttttgcggatcctttttcttttgcataatcaaagagagagcgcacttgaatggctgtcgtaaaacatacggcatcgacctctccgtttaacagctctcccatcagtttatcgaccgtctccctttcaggcggaatatgctgatacggcagaacagggaatacctccgctccgtttttctcaaggaactccgttaaaaccggcgctttttcgccatgaagctgtatcataacttttttatctttaaagtcaaatcgttccaaggagcggatcagccctcttgttgtaccgtcttcatctgaggcatgcggcgtgatgccgagcttttttaaggccgcatatgttttatagcctctgcagccgattttcgcttcatgaatggccgctaaaaattcttctttcagaccgattttttccgataccgacaataacgtttccgtaccgatgcctgtggtgaatatcacccagtcggctttttgctcggcaaatgttcttacgtcgggttccatttgatcctccgccaggtatacggttccttggagggaacggatgaccgccgttccgccctgcttttctattaattttgtgatctcttctgttttccgcgaaccgccgatggcaatccgtttcccgttcaatccttttcccatcgctgttttcttcttcccttcagatgccgggcgccctatggcaggccgtcatttatttctattattgttacgcaatcagacgggaaaatcaagctatgctcccgttgaatcccccgtgcagttgctgtatcattaaccggacagaacgatttgattcgcggagggactttcaatcatggaaacaaaaaaagagttcgagacaaaaggatacgatacttcggtcatttatgagttcaatgaatatcctgatgttcacagcggccgatgtgacaattgcgactacacgctgtttaaaagctcagtgaagggcggaaaatttttgagggaatgccggagatgcggcatgaagaaaaacatataacaaaacaggcagccgtccggtgctgcctgttttcctaatcaattttcgacggacgccgttttcaaaaattcttcaatggcgcaaacagcctgttttggaccgccggtttcttttattttctgctgcatgcttttcacgcggctgagaatgtttttatcgccgtatacgttctgaacgtctttttgcagacgggccacagtgacttctttcagcggcagatgcacgccaagccccaattcatccacacgctttgcggtgacctcttgttcgtgcatttgcggaacgacaacgagcggaacacccgcattcatcgcctccattgtactgttcatcccgccgtgagatacgaacagctttgctttctccagcacatcaagctgcggaacgtgctggcggatgataaagtgatcgggcacatccgaaaaactttccggatcaattgttgtgccgactgacataataacccgccagcccgagtcccgaaacgcgtcaatacacatccggtaaaattcaggccaggcgttaaacgccgttcccagtgagatgagcataagcggacggtcatcggctgcatcaatttccagacttcccgtatttgtgcgttccccaagagacggacccgcaaaacagaatcgttcatcaaaggtttcctgtttcggctgaaaggcccttggcataaagacgatattcaatttttcaggcatgaaaaattcttccattgtcatccgtttcacttgttcattttcaattttctcctgatattcttctatcgcctgtttggccgcttccatcgtttcttcgtctcttcctaattgaaaatactcattcattgcataactcgggcagaactttacggccgggatgccgccattatccgcaaacaattttccggcaagcgctaaaaaatcaaacaggacgatgtcaggaaggtcgtctttgtacagctcttccagctgcggaagcacttcaaccgcttcttccagaaacatcacaaacgcgtcacttttgtttacccgttcttttatcgtcttcgggtccgcctttatgcttgtgcggtataaaacgggaatggcacccgttttggcaacggaagcttcaaattcctcagtcgtagcgaatgtcactttatatccgcgattgacaagttcctcggctacaggaagcgtgggattgacatgaccgtgagcggccacattaataatggcgatgtgtgtttttctcatcttttttcttctccctcattttcgtttatctcggcttctaaagactccagcccgtacatgacactgtttcggatcggctcaatccgaacgggctcaaggtgtgaaaaggcttttacaattcctttcagtgcggcttccgcttcaagtctggcaagcggagcgcctaagcagaagtgtacgccgaatccgaaggaaaggtgcggattcgattggcgatggatatcaaatacgcccgccttctcaaatttgttttcatcacggttggcagatgcaacgtagcagagaacgatctctccgcttttcaagcggcgcccgcgcagttcagtgtcgtgccggaccgtccttctgacaaacggagcgggagcgcgaaaacgcagcgtttcttccactgtttgcgcgatgagagaagggtcctgtctcagctcttcataaaggccgggcgtctctaatatgctgtaaaccgcatttgaaatgagattagtcgttgtttcatttcccgccactaaaagcaggttgcaaaacgggatcagatcttctggcgtgagcttctctccctcttcttcctcttttatcaaaatagaaataatatcttggccgggctgttttcgtttgctttctattattcccgcaaaaaacgccgccagctccgcctcacattggtcacgttcctgctgatttttctccgccgcttcaggactcgcatctttcggcatgctgacgagaatgtccgaccattttttaaactgatccatacgctcggacggaacgcctaataattctgaaatcaccatgaccggcaaagggtaagagagatctttaacgatatcaatccgccctttgttctttgcctgtttcaggagatgatcggtaatgtctttaattctcggctcccattccttcaagacacggggagtgaaagcgcgattgacggcagatctgatttgggtatgtttcggcgggtccatattcagcatggactttgcaatcgagcttttcacatcagtcatgcggcttgagaacgtctctttatcactgatgacttttttgacatcatcgtataaaaacacactccaaaccttcgtttcttcatcaaagtatatagggctttcacgtctcattttttcataccaaggaaaagggttgtatacgtccaggccgttttttcctttcatcagggttctttggatggcttgtctcgtgctcctcagcttactcatgttacatcactcctgattgtttcatatttgaatagttgacgtaccttgaattttatcctagcacatattttcaatttttttctattcataaccttaactattaacataacacaacaaaagtcatgaatccggaggtgaaatttctcccaagaaaacagcagaagcgcacaaaaaacccgagccttcagccaggctcgggagaaatgttcactcattcgtctgcggtttctggtgctgcttttggtcttcaggaggctgcgtatttctttccatatcgtccgtatcagcgcccatgcctttcaggaaagaaaacagcagagtgacggccttgttgatttccgggtcttttaaagcgcggacgatatcaaaataacccgtcttcctgccgctgtctttttcttcgacggcctttgtgacgcccgcattgattttaacgataaacggctcaagctgttttacatcgagcatgccgagaacgccgcttaacagcaggagatttttcagcatattggccgtttccggcgtattcgccttcttcaccaggatatccatcactttgtctccttggccgaagagcccgcgcagaagcgccaaaacgccgcgctcgttcatgtgctgaagaatgtgcagagattccaaaatcgcgtctttatttcgtaaaagagccgtctcgatctcttctaagtccttttttcgtttgtcttcttctgtgacggtctgttttcggatgccgctgattgctttagccattctgctgtttccccctttttacggcgtctcccggaaatacataatcttgacgcgcccatttccgatcaacccggacaccgatctgcggctgcgggtttccgtaacggaaattgattttcggaagcggattaacgccttcttttttcaaaatctccatcttcgctgatgtttctttatatgccggtgtatcggtatccttatccgcatagctgcttgtcaaaaggttaatggcggcgtcttttgaatcgttcatcgggagatagacttgtttgccttttaccctgtctgtgatgacgcatttgactttcacatttccgtacggtgatgtcagacggacaagcgttccgtcttccagccctctttcttcggcgagttcgggcgagacctcaaggaacacactcggtgttttttcggatattccttttgatcggtaagtcagattcccttcgtgaaaatgctcgagcagccgcccgttattcacatggatatcatattcttcatcaaattctttcggctcggtccactgaacgggatatagaatcgctttgccgtctgaaaacggaaacttgtccgtaaataaaagcggtgaatcggttccgtccgctgctaccggccattgcagtgaattgtagccttcgagacgttcgtaagtgacgcctacgtagagcggcgaaagcattgccgcttcttccataatgtctgccggatgttcatagcgccaatcagcgcccagccggttggcgatgtccgtaatgatctgccaatcaggctttgaatcgcccagcggttcaaacacttcgtaaaggcgctgcaccctccgttccgtattcgtaaacgtcccttctttttcaagactcgggcttgccgggagcaccacatcggcgaactcggccgtccgcgagagaaaaatatcctgcacaacgaagaaatcaagcttttcaaaggcggcatgaacatggttgatattggagtcgacaagccccatttcttccccttttacatacatacacttcagttttcccgagtggatgccctcgatcatttcatgatttgtcattccgatttctttcggcaggtctgttccccagccctgttcatactttttgcgggctttttcatccgttactttttcatagccggggaagctgtcaggcatactgccgaaatcactggctccctgcacgttattatggccccgaagcggatatgagcctgcgccgggcttgccgtaatttccggtcacaagaagcatgttggaaatggccgtgctcgtatcacttcctccgatatgctgggtgacccccatcgcccacagtgcgcatacgcttttggcttcatgaatcatccgggccactttaattaaggtatccttgtccacaccggtatgtttttccgcatattccatcgtataaggttcaaggcttttcacgaattcatctaatccgttcactctctccttcagaaatgcagtatccgccaaatcgtgatcaagcagatatttcgatacggcattcagccagacaatatctgatccggcacgcggctggaaaaacacgtcggagcgctcggccatttcatgttttcgcaagtcagcaacgacgagcttctgtccgtgcagcttatgagaacgtttaatgcgtgtggacaggacggggtgagactcagatgtatttgaaccgataatcagcacgagctcagctttttctatatctgtaatcgaccctgaatcaccgccgtatccgaccgttctgaacaatccggccgtggcgggagactggcagtagcgtgagcagttgtcgacattatttgttccgataacggctcttgcaagcttctgcatcacgtatgattcttcattcgtgcatttggaagatgtgataaacgcaagcgcgtccgggccgaaatgttcttttatatcggtaaatttatcagcgatcagctgcagcgcttcatcccattccgcctcccgaaacgagtctccttcccggataagcggtttggtaaggcgcttttcactattgacgaaatcccagccgaatttccctttcacacacgtcgaaattccatttgcgggcgcctcagcctgaggctcgacctttaaaatgtctcttcctttcgtccatatatcaaaactgcagccgacaccgcagtatgtgcatacggttttcgtttttttgattctttcatcccgcatggccgattccatatccgatatggctaaaattgatccgtatccggtttcgacgccttttgtgatatcaatcatcggccgaagcgtctcttggttaatgcctgttaaatacccagcttcgccttccatgcctttttccatcatggcattgcacggacataccgtcgaacaatgtccgcaggaaacacatgatgattcattgatcggcacatcctgatcccaaatgacccgcgggcgtttccgctcccaatcaatgcttaaggtttcggttacctgtacgtcctgacaggcttcgacgcagcgtccgcacaaaatgcactgatcgggatcatatcggtaaaacggatttgattcatctttaggatacggtttttgatcgaacggaatgctttgatgattgattttcatttcctttacggtattatgtatttcgcagctcccattgttgtaatcacagaccgtacagtacaattcatggttgtgcaaaatgttgtccatgccgataacctgcgctttttttacatcggacgaaagcgtatcaatgacatctccgtcctttatttgcgcggaacacgaacgcaccagttccccgttaacattgacgatacaggtatcgcacgtttcaatcggcccgagactcgggtgataacacacgtgcggcacgtcaattgaactattgttcaaaagctgcaaaacggtttggccgtccggcgcttccatttcaaccccattgattgtaactttctttgtatcagccattttctttcccctttctgtacccctctatacatcctctatgattcccaaccggcctttcactaaaacatctcgtttatctcaggaaacatacgggtatgagcggtaaaaaggaggcgttcacatgttgaagaaaaaaacactcgtcacgggattatcggcagtgatgctcacgggatgcgctttcggagcagaagcattttcggatacacagcccgtccatgccgcagccgcttcaaaaacggaaaaccagcgtgcacaagaactggtgaacagcctttaccaatcggcatttaaaggggaaatgccgcaaaatgtgaaaggcctgaaaatcaaccaaagcacaagacaggacgtttacaataaaatcggcgagccggaacaaaaagcagacagccgcaatccatttgatttatacagctggaacatgggaaaccccgggtatggattttcctatcataaaaacggaaaaatctcggaaatacgctattttggaacgggggtcgagcggcgcttaaacctcggcagcgtcacacctgacgtcttaagcaaacaaatcggcagcgctgacaaaatcctgacagtgccagaaacgggcgaaacagattacgtctaccatacggggcagtatgagctccgcttcgtcatcggcagtgatcaaaaagcagatcatgtcaacctaaaagccagataacgcaaaaaagcggcctcccgggccgtttttttcatagacagcttctccgtcgttccttacaatacatgggagtacaaaaaaaggggaacagtgtgaagtgaatagacatccattgacatacggaatatgtaccgtttttatcatcgccctcggtttgctgtccagaaccgcatacatcaccgccctattgcccggcatcataaacgcttatttaggagatgccttgtgggcggccatgatttttacaggattcgggcttttcttacggcacatccggacggaaacagccgcaattttgagcctctcgttttgctgtctgattgaatgcagccagctgtatcacgcgccatggattgacgcgatcagaagcagcacgctcggcgggctgatcctcggctggcaatttgtctggagtgacattttcgcctataccctcggggtatgcgctgccgcacttttagaatgggccgtaaaaagaaaccgccagccctcttcataatcggagcacgccgccgatatgaagggataaggaggtggaagctatggatatccctgcgttatcaatcgcaatgcatcagtcatctctggcgcagaatgtaaatatcgctttaacaaaaacggtcatgcagcatgcacaggctgcggcggaagaaacagtgaaaatgctgccgtcccagcacccgactgccggccattcaattgatgtgaaagtgtaaaaaaagatgccggatgataaccggcgtcttttttttgcccattgtacatacaccgtaccgggcatacaggaataaggtaaacggaaccaacatttgaaaaggaggttttcctcttgtacgatcctttcgatcatgaatacacagccgagagccacgaacgggtgccatatcattatccgcggccgccttattattaccccagaccatatccatactatccgcggccgccttattattaccccagaccatacccatactatccgcggccgtatatcccgttctatccttggtattaatgtttgaaaagaaatgactgcagacaggaggcttcccctgtctgctattcaactttgaccgacaggatatacgggagggcttgaactttctccattaccgctgctttcccgcttttgcttttcacccttcccttcacttcaagcaccgccttattcaattcataggacgtaatcagaattcctttttcctcaagagaagttaaaatatcatgcatgacggctttctcttcaatcctgaaactgacagacaaagaatgcgccgccggtttaaacagaaaatttaacagttcaagcccgattaacgccaaaatcgtgccgctgatgccgatgacatacatacctgccccgatcgtcagcccgatccccgacgtagcccaaatccccgcggccgtcgtaagcccccgcacgacatgccgctgcaaaataatcgtgccggctcctaaaaatccgacgccgctgacgacctgcgccgccacccggctcggatcaaaggacgtatggctgttggataacaaatcaaaaaagccgtatttggaaacgatcatcatcaaggcgctgccgacggccactaaaaaatgcgtcctcaaaccggcttcctttgccctgaattctctctccaatccaataagagccccaagcagacccgcaaccgccagacgaatcacaaaatcaagttccatccgtctctctcctttccttatcttcttacccgcttttataacccaatcatgcggtgtatctttttttaaaatgcaccgactaattgacataaggaggttttatgaaatatattctgtggttttttatattattgttatttagcttatttattttgggaggatataaagcagctgtttctcaccctgatttcccggtgccattattcgctatgcacactaaaacaaaggaatatgaaaaaggaaaatacgtttcaaactatacataccgtttcgcaaaagaagaagaaggtccgagcggtttataccaattggaaatagccgaaaaaggctggaaacttaaagggcaggaaggacttatcaaaacctatgaaaagcgaggagaacgtgtttcactttttttcggtacgggggaaataagcgtcattgaagaatgatccttctcaaaagacaggctgaaatccgcaaacggcatatcttttacgactcccttatctctgcgaatctataaattcagccaatatttcaattaaggcgaacacctttctgatgcaaaaaatgccgccttcaatgagaaaatcattatacaaaaacaaaagcgcaactgaaaaagaataagcacctcataaaaaaagccctctttttaaaaaagagggctgcagaaggaaaacaggtaattatttatctaaagtgtactcactcacattaaaagtaagaatgtttccaaaaacaatatggtcccttctattttgaaaaggccctatattattatagtgcttctcgataacatatctagataagcctattccagaacttttttgatcataccatctgataaaatctttaatctcttccattgaaagatcaaattctttctcaagacctgtggtcattgtaacaagaagaattgcccgattactggcgggctgtttatttggtggttcctcaggattctttggttctccatctttatcctcttcggtttttaccggagtaagagcatgcagatattctaatgcatatccagacggcgttagaccgccaaaaagataaagattgtctccaactgcggctattctggcatcatatctttcaaaaggatagggtttttctacgctaatttcatctttaattggatcatatacttttgttaaaggctcaatcacacttggattttttctaccgccaataatgtaaatcttattattaaggacagctgtcgaagtattttgcaaaggtcctaaaaattttttgcgattccatctatccataacaggatcatattcgtaaatatattcgtttagatcgcttctgatatgtccttgaactacttctttagtttgcccgccaactaaataaatctttccgttaaaaacttcagtttctgttgcatatatattaattgggggcgcttttttaacactccaagttttggataaagtatcaaaagcataatgttgcgaatgagcagcatcggtgtcgaatcccccaatcaaataaattgtatcgttaataacagcggctgatgcatggcaagtcggggtcggaatatcaggtacacgtccccatgtatttgttttagtatcataaacatctacagagctgtaaacatttgctcccttataaccgcccaatacataaatataattacctatcactgctgtgcatgaacctaccctgggtgtgggtatatctaatccttgcgtccatttttgacttatggtgtcaaaactataatttttgttatatttttgattacgtgcacctcccaatacataaatagagttacccacaactgctgattcaaaagcataattaggttcaatcatatcaagtaatcttgtccacttgtcatatttctctgtcaatttattcattcctctcatctttgtgataattccatttatagatggcgatcgtatgacaagagattcatttaactaagcgatccaagatcacttactttcgatcaaagaaatattgaaaaaggcctctggatttaaaagtgatttggttttcacttctcggttattggccaacagtttactaaaaatttagtatataagtgtaatatagaataacacctctcaatgaatccttaatgaagctcataatagcttcaaccaaaggcatttcacattaaagtaaagatcactctcaatccaactgcatctctcaaacagaatgtccggcaatcacctcaaaaaacgaggtgaaatctgtcagtatcccgtcacccgccagctgtttttcttcaaatagcgcgcggttttttccgtgcgggtcaatggccataatcttgcccgcacctgcttttttcgccgctgtgagccccgaaaaggcatcttcaatgaccaagcattcttcaggtctgaggcctaacttttccgatgcgatgagaaaaatatccggcgccggttttccggggaagctcccgtcatcaaacgtgactttgtcaaaatcaaaccactgatccaaatgaaagacgtcaaagtaaaactcgacattttcctttaccgtagccgtagcgatggtcatcggcgtttcagattttttcagatgattcaatacgccggtcagtcccttcgtcagctttaattcgtctttgttttcaaggcataattctctgtagtaagcttctttttcaaaagacagcttcctgatttcttcatttgttaaatcgccggaaataaaatacgtcaggatttcactgtttgttctcccgtgaatgttaacgaaaatgtcttcatcagaaatggttttcggcgcgtattttttcaccatgaaaaaccatgctttttcgtgcagatgcgaatcttgaaacatcgtgccgttgaaatcaaaaataacccctttcatcgaaccgcccgccttttttatttttttgcgattttgacatctacatattgctcgtaatgaatttgaacatctttcatgactttatcatccgtaatcagatagtccatatcgtgcaagttatagaacacgtaaaaatcttcccggttaaattttttattatccgccagcaaaaatttcgtccgcgaattattcagcgcgatttggtgagcttccccttcttcaatgctgtaagaagaaatctcatcattatgtatgccgttggcgctgatgaaagccttcgtaaaattgaatttctgcagattgccgttcacgatggggccgacgaaggcaccggtattttttcggaagtcgccgccaatcaggatggtatccgcagtgtcgccatgtttcaaaatatcaaatacgggatagttgtttgtgataatcctgattcgcttatgcagcaggtgtttcgctaaaagttcaatcgtcgtgccgggccctaaaaaaacggtatcgccgtcatttacataggaagctgcgagttccgcgatcttccccttctcctccatttgaacaccgagtttttcattatgcgataattcgtgatcaatggaataagatatgctctgtgcgcctccgtgaatacgtacgatttttccggccttatccagctcgtccagatctcttctcactgtcatatcagaaacttccagttcatcgataatatcactcaccgtaataaaccccgcgagtttacgatatcgatgatttttaaaagtcgctctttttttaacatgttcaatcatcccctcaactttacacacaatctaacatactgcggcaatccggtcaacaaaaataaacattaacaaacaacataatcaacatgtaaaacaacgaaaaacttatataacctctataaacacagatgttatttctttatgaagctattgacaacaaaaatatatgcgtttactattaaacaaaagacaacaattacaaacattaacaaactccaattcacacattggcgaaggaggattcagtaatgctcaaattacctcatgactttattttcggcggggcgactgcggcatatcaagcggaaggcgccacaaaagaaggcggcaaaggccctgtggcctgggatgaatttcttgaaaaacagggaagattcagccctgatccggcaagtgatttttaccgccagtttccggaagatattaaactatgtgaaaaattcggaataaacggcatccgcctttctatagcctggacgagaattttccctgacggcacgggcaaaatcaatcaggaaggtgttgattactatcatcgtattttctcagagtgccataaacgcaacgtcaccccttttgtcacgctgcatcatttcgatacaccgaaaggattatttgatcagggagatttcctcaaccgcgctgcaatagaagcgttcgtcagctatgcggagttttgctttaaagaattcagcgaaatcagatattggagcacgtttaacgaaatttatcccacagccaccaaccagtatttactcggggttttcccgccatctgttaaaagtgatatcacaaaagtcattcaatgcctccatcacatgatggtagcgcatgcgatgaccgtcaacctttttaaagacggcggttatccgggagaaatcggggtcgtccactcattggaaacaaaatatcccgccagcggcacagaagaagaccgccacgcctgttttctggatgacgcgttatcagtgagattcctcctcgatgccacctaccttggctattattctgaggaaaccatgcgtgctctggatgaaatctgtgaggcaaacggcgcttcatacgagttttcagacagtgactttgacgtgatgaaaaaagcctcaacgcgcaatgattatctcggcatcaatcattatcaatgccatttcgtcaaagcgtacgacggagaaaccgttattcaccataacggaacgggcgataagggcacttcggtctataaagtaaaaggaatcggcgaacgaatttacaaagaaggcctgaagcggaccgattgggactggctcatttaccctgaaggcatgtatgacatgctgatgcgcatcaaacgggactatccgcaatataacaaaatttacattaccgaaaacggcatgggctataaagatgagtttgaagacggcatcattatggataaggcaagaatcgactatttaaaagtatatttagaagccgtcagtaaagcgattaccgacggagtcaatgtaaaggggtacttcttatggtccttaatggatttattttcatggaccaacggctacaacaaacgttacggtcttttttacgtcgacttcgacacccaaaaacggtatccgaaagaatcggcctactggtacaaacttgtaagtgaaacaaaaacaatcatttaacgatcatacatgatgaaaagaatctctttccatcatgtgtgccgtctttaggaggtttttttcatgacaaaggaagaattgcagatgctcggttttgaaatcgtcgcctatgccggcgacgccaggagcactttattgaaagtcctgaaagaagtccgtgccggaaacttcgaaaacacggaagcagcattgaaaagcgccgatgaaaatttaaccctcgcccacaatgcgcaaacgaaaatgttagctgaagaagctgacggcaaggacatggaattagggtttattttcgttcacggccaggaccacttgatgacaacccttttgctccgtgatcttattcaggattttatagaactctaccgaagccgccgataaggagtggaaaaatgaacggtatcatcaagcaaatcgaaaagggaaaaccgtttttcgaaaaaatctcaagaaacatttatttaggcgcgatccgcgacggcttcttaactgccatgcctgttattttattcgccagcattttcatcctcaccgccgctgtgccggaagtgttgggtttcacttggcctaaaagtgtttctgaatggctttggaaagtttataactattcaatgggcgccctcggtctgatcgttgcggcaacaagtgcgaaatgcctgagtgaatcaatgaaccgaaaaatgccgaaaaacaaagggatcaaccccgtttcagcgatgcttgcttcagtcgtcgggtttctcattttaagcgtcactcaaatcgacggcgggttctccgcggaatatctcggcacaaaaggtcttttagccgcttttgtatccgctttcataacggtgaacgtttacagattctgcgtgctgaaaaatattacgattaaaatgcctaaagaagtaccgggtaccatttcacaaacatttaaagatgtttttccgttcgctttttccgttttggccatggtgatcgttgatttattgatcaggaatacgctgaatgtatcgtttgcggaggctctctcctctctcttatcgccattttttaccgccgcagacggttatctcgggatttgtgtcatttggggaatgatggcgctgttctggtttgtcggcgttcacgggccttctattgtagagccggccatcgcagctattatttacgcaaatgtggaggcgaaccttcagcttcataatgccggcgagcaggcgtccaacgtgctgaccgtcggactcgggaacttcgtcggcacaatgggaggaaccggcgcaacccttgttgttccgtttatctttctgcttttcgcgaaatccaagcaattgaaagcagtcggaaaagcatccgcggttccggtgtctttcgcagtaaacgaacctcttctctttgctgcgccgatcattttaaatccttattttttcattccgtttgttgtaacgccgatggtgaatgtctgtctgtttaaatttttcgtggatgtcatcggaatgaacagttttatgtatgttcttccgtgggccaccccggcgcccgccggcttgattctcggaaccggcatggggctctcggcttttgttctgacggctgtattaattattgtcgatttcctgatatacctgccattctgtaaagcttatgacaaagtattagcggcggaagaagcccaacataccgaacctgaaaccgcgccgcaaaaatcccgggagatacagcccgtaatggccggcgcctcagaagacgcggccaccgtcatcagcacaaatcttcaggaatcctcatccgccttggaacacggcaccaatgtgttagtgctgtgcgccggagcgggaacgagcgctatgcttgcgaacgcactgaccgaaggagccgaagaatacaacgtgccgatcaccgcctcagcaggcgcctacggatcccattacgacatcatgaaagacttcgatatgatcattttggctccgcaagtcggctcttattatgatgacattaaagaagatgcggaccgcctgcatgtgaaactcgtcgcaacgaaaggagcggaatatatcagcctcaccagaaattcacaaaaagccattcagttcatactggagcatacctcaaaatagaatcggaggtttaccatggatgccaaacttttgaaatcaagattcgaagacattttcaagagaagtaacggagaactgtttttcgcacccggccggatcaacctgatcggggaacatacggattatataggcggtcacgttcttccatgcgcgatcacgatcggaacatatgccgtatgcgcaaaacgcgaagatcaccagatccggttatactcagaaaactttcctgacagcggcattgtctgccttgatctttccgccactgcatacaaaaaagaagacggctgggccaattatccgaaggggatggtccattaccttcttgaagccggcggccaaatagacagcggaatggatattctttttcacggtacgattccaaacggagccggtttaagctcctctgcttccattgaaatgttaaccggttccattttaagaaagttattcagcctggatgtttccgatactgaactggcgcttatcggaaaaagagtcgaaaatgaatttatcggcgtgaattcagggattatggatcaattcgcagtgcaaaaaggcaaaaagaacatggccattctgttaaactgcgataagcttgagcacgaaatgattccggctgcttttaacggatataaaatcgtcattatgaatacgaacaagcgccgggagctggcggcttcaaagtataatgaacgccgcagcgaatgcgacgcggctctcacggaactgcggcaatatcaaaatatcgcatcacttgcggaattgacgggagaagaattcaacgaactcgaacctcttctctcccgtgaaactttgcgtaaaagagcccggcacgcggtcaatgaaaacgagcggaccctctcagcggcggaagctctcaaatcgaatgatttgaaaacgttcggggagctgatgaatgcgtcgcaccgttcgttacgtgatgactacgaagtgaccggtgacgaattagacgcgctggctgaagcagcctggaaagaaggagcactcggagcgcggatgacgggcgcggggttcggcggctgcgccatagccattgtggaaagtgaagaaaccgccggctttatccgggccgtttcatctcactaccgcagcaggacaggtcttgaagcttctttctacatcgcggatataagcgatggcgcggctgaatggagggaaaaataaatcatggcgattctcgttctcggcggagccggctatatcggttctcatgcggttgatcaattagtaaacaaaggatttgaaacgatagctgtggataatctccagacaggccaccggaaagccgttcatgaaaaagccgttttttaccatggagatatccgtgacaaaccgtttcttcgctctgtatttgcgaaggagaacgtaacaggcgttctccattttgccgctcaatcccttgtcggcgaatcaatgaaagaccctctttcatatttcaataataatgtgtacggtacgcaaattacgctggaggtcatgcaggaattcgaagtgaaacacattgtgttttcttcatccgccgctgtttacggcgaacctgaaaaagcgcccatcacagaagacatgccggaaaagccggaaagcgcatacggcgaatcaaaactcatggcagaaaaaatgctgaagtggtgcgataccgcttgcggcataaaatatgtctcgcttcggtattttaacgttgccggcgcgaaaacggacggttccatcggagaagatcatcatccggaaacccaccttatccctatccttttacaaaccgcgctcggtcagcgcgaggaggttttgatattcggcactgactatgatacaaaagacggcacgtgcatccgcgattatgttcatgtttctgatttaatcgatgcccatattctcgctctggaatatttgcaaaacggcggagacagcggcattttcaatttaggatcaagcagcgggttttccgtatcagaaatggcggaagcggcccggcaagtgaccgaaagagacataaaagtaagagcgtccgcaagaagacccggtgatccaagcgccctcatcgcttccagcgataaagcgcggaacattctcggctggaatccgaaacaaacggacatatcggaaatcattgcgtcagcatggaattggcatcggcatcatcctaacggatacaaggacaaatgaaatggaggcggcggtcattgacgtttttgaatcagtggcagggtttctgaaagaaagcactgtcttaggcgacataaatgaaacagatgtgatttatacaagaaacagacttctcgatctgctcggactgacggattatgcagaaccgaaacgtatcaagaaacaaaacaggcttcactatttggacgaaatggtgaaagacgcggtaaaacggtcaatcataaacgatacgccggctgaaagagacatgctgggaagcagaatcatggacgtaatcacaccggccccttctctgatcaatgacgcattcagcgaattgttatcagattgcccgaaaaaagcaacagattatttttatagattgagtcaaaacaacgactatattaagacgcgggccattcgaaaaaatatcgtgtaccgctcaataacaccttttggggaattggacatcaccattaatctatcaaaaccggaaaaagaccctaaagacatcgccgcggtaaaaaacagtccggaaaaccggtatccgaaatgtctgctctgtatggaaaacgaggggtatgccggaacaccgcatcaccccgcccgttcaaaccaccgcatcatcaggcttgacttagcgggagaacagtggggttttcaatactctccttatgcgtattacagcgagcatgccatctttctttcaagcgtgcacaagccgatgaacatcagccgcgaaagcttcagaaggcttctggccattacggaaattttccctcattatttcgcgggatcaaacgcagacttgccgatcgtaggaggttccattctttcacacgatcattatcaaggcggcgcccatgagtttcccatggcaaaagcgggttccctctacccttttcatatgcgtcattttccagacgttcaggccgaagccgtgaagtggccggtatcagtgatccgccttcgcgcaaaagatccggatttgctgacagatgccgctgcgtatgtttttgaaaagtggcgggaatattcagacgaaaccgtcagcatcatcgcgaagacaaatgaaccccataataccgtcaccccgattgccagacgcaggggaacggattttgaaatcgatctcgctctcagaaacaaccgcacctccgaagattatccggatggcatttttcacccgcatcaagacgttcatcacatcaaaaaagaaaatatcggtctgattgaagtgatggggctcgccgttttacctccccgtctgaaagatgagctggcagaagtgaaaaagtatttactgaatgaacatcatgacatcaaggacattcatcttccgtgggctgaaaacatcaaagcggataaagacgtgacaccggaaaatgcagccgctgttttacaaagagaaaccgcgaatgtatttttacgcgcgctgaccgatgcaggcgtttttaaaatgacacccgaaggaattcaggcgtttcagcgtttcacgacgttattggagaatgacagctgaaacattcagagtgaaatcaatcaacaatcttttttatcaggaggtattgtgatgttcaaaaaccgattgaaacgtgtatttgtaaacgcaatctgtctttctctcattttcaccgcttttacatttcttgagaagtctcctaaagcaaaagcggatgccccgtttgcctatggcgctgatataggatggctgaaacaaatggaggatgaaggtgtgcgctggctggatgacggcgggaaacagaaagatgccttgcagattcttaaagatcacggaataaatgccgtgagactgagagtgtttgtgaatccgccaagcagctattattggctgaaagacggcacaacatggacgatgctcggctatagtgacaaagcgggcgtacttgcggcggccaaaagggcaaaagcgttaggaatgaaagtaatggttgacttccattacagtgatgtgttcgctgatcccggccaccagatcaagccgaaccaatggaccggctattcaaacagccagctgcaggcagccgtgtataaccatacgtacgatgtcatgaaagaacttaaaaatcacggcatctctcctgattgggtgcaagtaggaaatgaaatgaattcaggaattttactgcccgacggcagcacgagcgatttcagcaaattgaccggcttactgaacaaaggctatgacgccgtgaaatccgtcagcccggccaccaaggtaatcagccatttagcacacggcacggacaacagcctattcagatggtggtttgatcaattctttaaaaacggagggaaaaccgacatcatcggcgtttcgttctatccctattgggaaggtaagccgtactgggagctcaccggccatttatcatctaatttgaatgacatcgcctcacgctacaacaaggaagtcatggtggttgaactgggcggagatgaaaataatccgaaagattcctactggaccataaaagacaccataaaactggtgaaagccgttccgaacggcaaaggaaccggcgtattttactgggaacccgaagctcactccagcgttctgtcagatgcgtatccattaggcgcaaccgcaaaagtgtctaaaaacgtcttgaaatacacaaccgcaattgacgctttttatgatgccgcaacaggaaaatgattgatgcaattctaaagcaggctcttttcgcagcctgcttttttgtaaggctgcagagttagcctgttatgaagagctaataacgaatacggaaagaaacatactcgaaaaaccacatttcggttaaaaataggatacttcttctgttccccctccttcttatttctgcgcactatctctcagttcctaaataataactttacgattgttgaaaaagaaacaaacattttataatattgtgtaagcaccaccgagcaggaggacgggtcatggacaaaaaagaacagctcctcacggatttcagggacttttttaacaagatggtgtggctgaataggctgaagatggaagaaagccttaaggggcataaaccttctgaagtgcattgcatcgaattcatcgaaaaaattgaagacgccaatgtgacaaaacttgcggagtccctttatatgacaagaggcgctataagtaaattaacgaagaagcttatcaataaaggccttatcgaaagctatcagaagccgcttaataagaaagaaatctatttcaggcttaccgagcaaggaaaagtcatttataaaattcacgaggaattgcacaaagagtttcaagaacgggacaaaatcgtgtttgaacaagtaactgatgaacaatttgacacgatgctgagcttcgtggaaacatacagcaggcatttggattcagaaataaagaaacttggtgcagacatgaaatcggaataaaaccataggcagccctgctccatgaaaacgggctgcctttttatatccctcttattgttgacaaagaaacaaaatcactctattattttgttgacaaggaaacaaatacggcgattttgagaggagaataatatgtcaacacataaaagaaaggaacttcggctgccaaaagaagttctcacagccgcctgggctattgcactgggagcaattgctccaatgcttgactctacgatggtaaacatcgccatcgacaaactgaccaaagacttcaacacgacattggataccattcagtggtccgttacaggctatatgttagcacttgcgattgcagtacccgtatccggctggcttatgaataaatataacggtaagaaaatcttcatcggctcagtcatcgcctttggtgtcatttctgtttttgcgggaatgagccgtgacgtttccagcttcatcttcttccgtttgcttcaaggattcagcgccggcattatcactccgcttatgtcaacactcttggttaaaacggcaggtccggaaaacctgggaaaagtgatggcaatcgtcagcacccctatgatcttcggcccgatcttaggacctgtcatcggaggcttcatcgtccaagtcgcttcatggcattggattttttacatcaacgtgttcatcgttttggttgccgcaccgcttatgatgaaaaccattccagactttgaaccattcaacaaagatcgtaaactcgatattttcgggattatcaatttgtcattaatgagcgcggcattgatgtacggtattacgaaagcggcggatcatgcatcatttaacaatagcgacaccattttatgggcgggcatcggtcttgtttcagcagtcatttatcttgtatataatctgatcaagaaaaaccaaaccgtgctgcctatgaatttgtttgcaaacaagagcttcttagcatcttcgatcgggttgttcttagcgaatgttgccatcatggggccgatgttaatacttccgctgttttttcaagacattcgtcatttcacggcagtcggagcagcactcgctttaatccctcaaggagtcggaatgctcgtgactcgtccgctgatcggaaaaatgattgataagatcggtgcgaaatacgtggttacggtcagtcttgttctttcgctgatcggatctatcccgcttatttttatcaccgataacacaagtatgatttggatttccgtcgtattatttatccgcggcaccagttttggaggaattatgctcccattaatgagtgacgcttatacaggtcttgacagcaaacagcttccggaagcaggtgtcggtattcatatgattgaaaacctcggttccagctttgggtcagctgtgatcgcaaccgttaccgcaactgtcatacaaggattgcagccaacgattccgaacagtttaaaaggctaccatgccggattcttagtatccgtcatcatccttgcggccatcttcattccaagtctgttccttacccataaaaagactgcgatataaagaacttttcaaagtaaaaaacccttgcgcagcaagggttttaatgaatgaaactgatgattgttgccggcagagtcagccaacaacatacaaagccttttactcattcacattgcttttcattaaccattctacttccgttaattcttgtttttgaacgtcttttgtgtgctttttcgtaaaatggactttaacagcttcttcgttttcccaaatctcccaaagcataattttgcgttctgatggttcaagcggatgagcatggaactgaatacagccttcttctttgttcgtttcttcctcaagttttttgaattccttcattatttcattaaggtctttatcactgatgatttttaagcatgccgttatgtaatgcatcgaaactccccctcttcccatcattttatggctttacattataacatcgaaacccgcataccgcattctcaacatataaaaaaccgtccataaaaaatgaacggcaatgtttatttaagatcatgaagagcgacttttgcagcctcagcgataagagcattatgataatcggcatcttctgtaaatcggtttgacaggattgccaaaacaatcggagctctgtcaggcggccaaacgatggcaatgtcgtttcgcgtcccgtaacttccggctccggatttatcgccgacttcccatcctgcaggagcgcctgcccgaatcagttcatcgccggtagcgttgccccgcatccaatccgttaagatcgtgcgcttgtcagtcgtgagagtgttacccaaagtgaacgctttaagatcggttgccagtgcctttgctgtgcttgtgtcacgacgatccccgggaatcgcagagtttagatccgtctcgaatcgatccgctttcgttacatgatccccaatctgtttcagtgatttttcgaaacctttagggccgccaagctgctgcagcaataggttccccgcagtattatcgctgtaacggacagcggcttctgagatttctttcaggctcatgcctgtatccaggtgtttttctgtgattggagaatatgtaactaaatcgtctttgctgtagcggatgatggcattaagtttttcatttgagcttttcttcagaacagcagctgcagccagaactttataggttgatgcgtaagcaaaccgttcattcggccgataggcgattgtcttgtttgaccccgtatcaatcgcataaaccccaagcctggcatcaaattttttctcaagctgaacaaatttttgattcgttatacagcttgtcatttttgtgttttctatggattttgcttcagcgtgcgtagagccgaataaagggctgaaaccggtaaagcttaaacataaaagcccaatgcatattccaacttgtattcccgctttatttttcacatccagacctcctcattataatgtttttgtatacatcttctaattaacattacaaacaggatgaaagtcaatatatttcctgtgaatgattaaatcctgcattctgattcctccccttattaaatgcgccgcccttgccgcgtctgaatgtttgcatgtccgcttcgtgttcattatctatttgttatccctccgtgcaaataaaaacggacaccaatcagagcatagtgagctgtgcaatgatcagtgtccgcaggctttccgtcttggatctatatatgtttctcttgcagactataaaaatcataaggtaagttaacaaacgcattaccttaatctcgcggtcaaaattatatcattttatatatttcaataagattattatctggatctctgaaatgagcaactcgtgcacgccattcctgacgatcatgtggttcattgacgcatgtaatcccttgcttgtgcaaatagtcatacgttttatcaacatcttctaccttaaattgaagcaaaaatctcgattgcgaatctccgtctaaagattttctttcttctccaactatttcagccatattttcttgagataaaagctctattttcgtttctccattatcgaaaagtgcatattccatttccttctctaaccaacttattggaagtcctaatgaatctttataaaactcgacgctttttttaaagtcattaaccaatagtctaatttgcagcagtttcatattgaacgcctcctatcattttactggccattcatttaatcatacaatagggacctgacagcattatgtcaagtttccacaaaaaaatttcccatactgcacccaaatttcggatggaaagccttcgaagattcatgaaactgcgtttgatcaattcacattcttagtttgaattctcctcctctccaccgtggaggctccggccgtgtaagtcgcgcacccgtaaacatccggcccccgctcccataagtaacacaactgataaataattgactgagtcgttttttcaccgtcatcgcttcccctgttttttatattctgcgatttccttaggggtagccttccggactccgtctgtgtctgtcctgtttgccacttgagcgccttccatgttttttatctcgctgacgactcccaaatgctctaaatacacatgatcaccaatcttgaaacgattcagtttggcccgctcctcggtcatgctcctgtattcagtcgcggctttcatttttaattcagccagacacatttgacaaagtgttactgttacagaattgccgttaaaatcagtaaacgaaaccgatctgacagattccttttccgggtgcatcgtacatgttttcttcataggtgaaggccgtgtaaatttaatcattccgcttcctcctcaaaaaagtcttttcgtccctctgacataactcggatgaatgggaagttccgtacccccgcattcgaactgtcacaacacatggagattgcctttccttcgccgtctgacggattttcatccatcctgcatagctgtaagcctatattcctttatattcccaatgcccgccgcacttccctgttatgatgaagtttttaaagctattgaccagttgcccaggttgattccatgcggaaagcagtttgggccgccgtatcctaattcattcgggtaaatttcagccctctaatatgtgtgtgtatgctttttaaaggaagtgcgtcacatgatgttctaacaaccgattcaacctaaagctaactctaccccaattcccgatcataaaataagtaaatttacccagaacaaattaatcattttgcactttcaaaatacttatttggcttttccttcattcttccatggtaatatcttgttgaagtatttcgcatgaaaggatatggtcatgaaagttttcgaagcaaccaccctcctcgccgccgccaaacagcgtgcgggtgaatataaaaaactgcgcggtcagatggtcaacctaaaaaaagcgtttcaaggtatggctgatcttggtgacaatgatttctcaggccggggcgctgacaatatcaaagcctttttccaggatcacgccggcgtcacagacagctggcttgatctgatcgatatgaaaatcgcatttctcacaagccttcccggcaaagtcgaagacgcaggtctttccgaatctcatgtagaagaatcttttctggagcacgagctcacccatgccctcagtaaatcaaaggcgattatggaagcgcagaaaaaagacatgcgctccatcctcggtgagatcgaagacatcatctcgctcgaattgttttcaaccgaaagcacagatcaaaagctttcttcagctgacaaaaaaagaagcgaaaccatacataaactcggcaagcttgatcacgatctaacgaaagaatacgcagaaaccgaagcgaacgaacagtttatccaagccgactttcagcagctccaaaacgccacaggcaaaggaaaaagcgccacgccgcttcactacaacgccaaagcgtaccgtgaaagcgacatccataagaaaaaaggcgatatcgcaagacattcggatgcttatttgacgattaaaaaggaagaagcgaaagagcgtgaaatcaaggatctgaagaaaaagctggctgatggtgtcaccgatccggatgagtatttggaaatcgcaaagaagatcggctatgaaaaccttgaacccgctcaggtggaatatgtaatgcagcttgaacaagcaaaacagcttgaagaagtcggagaaacggcttgggatatcgtcaaaggaataggcgtcggcctttatgatgtgggaaaagacaccataaccggcgtcaaagatctggctgtcggcgcatgggatttttaccatctctccgatgaacaaaaagtcgctaaaaccatatcggctgtattgaacacgccctcctacgcaaaaatcatatggacaaacctggcggattcgtggaatgataaaatggttaacggggatgcgtattcaagatcccattacatcacttacgccatcgggagcatcgtcgggctcaaaggttccggctcagctgtaaaagtatcaagcaagctcgcgaaaacaggcgccgccaaagtggataacgtcttggaagccggtgaaaaagcagctgcaaaacatgtaaaaaccgggattgaaaaaggaaaaaattatatcaattccgtttcgaaaaataagtaccaacccgcgcttgccggaatagcacaggatattgaaaatactcacaatgtgaagaatactcctttgttgaaaagtattattgaagatcagaaagagagtgtgctcagtaaatctgtgacttctgacaataacggcatacatagtgttaaacaaggagacagcagtcctctcgcaccaggcggtggcttagctgctcacgaagcaaaaggcggacaccttctagaaaggcatgttgggaagactgatgaagagttattacagaggctacagataaacaagaagatacgtgcctcttctagtttcactgataggccaactgcagaaagagtcgctaatgaaacattaactaaacataaaaaggaaattgaagagtggttaaaaagtgatgttaacgatccattaccgttaccttatagaggaaccgaagttataggtagaggagttcgtaaaggttcaaatgaagttaaagatatgactaatgctagaatagtattaaagaaaaataaagatggtagctttatactaacaggctacccaacgaggtgatatataatgattgaaattaaagtttctgatcctgtatttagatttctcggcggacattttcaccaagatatagagtctccggaaaatgcacttgatgaatatttaaatgaagcatcacaaaaactaaaagaaagagatttaatagcactaactgagtttgtaaatagtgattattcagaagaagacaagaatgaatttatagaggaagcagcggatggtatatactttcctgaagatgatataactccattagaatggcttaagcaagtcactgaacaaattaaaaagcatcttaaacaacatagttagaaaaagagccctcttttaagaagggcttcttttattaattcaatttcgctttcgtttttggtccgcaaattccgtctggcttcaaaccatacatgagctgaatcgtactgaatcgttcagccgcatttactgatgtaagtgaatttaaataaattgcaaaaaaaccctcctcatcttgagaagggctctgacttatacttctttttctctaaatcagtccgaagcaaaaaactgatgccgctcaacttttcaatcgaagtgcttcagcgggttctccaactatttgcccctatgcttttcttttgctttttgttttctgattaaatattcttgttcctttattttttctctttgttttttcttttcttttttcaagctcctgttttattgcattttgcgccttagttgatatcccgatatttttcatctctttagaagcttgtcattgcaatctttttggatttaatttcttagattttgctttaacacaaccccttcttgttcagtgtgggagagagtctgtaaaaaaggaaagagtctccgcttattttaacaacacttcaagttttgctttggttcaagcgcataaattccatcagcttttaatccattcaccaattgaaatcgaattactgcattcgctgttttcgctccatatgctccatcaatcccgaagttcttccgctttaataaagggccgacagcgccgttcgaatctgttttacgctctcccctcgggttttaatgggcttttgacttaaaaaaccggaaagcaaggggaagtatgatttcttgccttaggatggagggccccctgtatcacttctttatcatcgacggcaaaatgatatctagtcgattcactgctaccggtcatataactgatttcattagcggctgcatgcgtcatttcctgtgctgtgaatgatttccagattttcgctgtatttttcatacaaaactaaatattccgtttttcaaatacaaaaaaacagcaggattaaccagctgctgatcgttatcactttagccgttcagtgatacggaatttctgtatttctctgtaatgaacaggtttcggcaaagaccgccgccttaaaggcgatgttcacctcccttgaagtatacagcgaatgtacttcaaaatcggcccaaaaaagcagttccgtccccaattcgtccccaactcgatgaatgatgacaaaatcaataaataagcaaagtaaaaaacccttgcaacgcaagggttttggctatgattccgactgggctcgaaccagcgacctctaccctgtcaaggtagcgctctcccagctgagctacggaatcatgatatgtatgtgttgctgggtatgttgttgtctctctgacatttataattatatatcctgatttctcattcgtcaacactttttttatctaaaataaaaaagggcgcgtcgcaaaattgacggcacccttttcgtttatgatctcacttgggcgggggttatttttttcaatgcctgttcgaagtcgcgttctaaatcttcggcgttttcgactccgacgctcaggcgcagaaggccgtctgtgatgccgcgtttttccctctctgatttcggcatggcggcatgcgacatggctgcagggtatgagagaatggactcgacagcgccgaggctgacggcaaataccggaagcgatacgttttcgaccagctttttgacggcttctttgctttccaattcaaaggacaggacggcgcccgctccgctcgcttgacgtttatgggtatcggctcccgggtgtccggcaaggccgggatagtaaacgtttttgattgcgggatgcccgtcaaaataggcagccagccgctcagccgtccggctcgctttttccagtctgacctgcaatgtttttaagcctctcaatacgagccagcagtcctgaacaccgagcaccgctccaaacgagttttgcagcttatacagctgattgccgagctcttcatcttttacggcggcaaggcctgacagcacgtcactgtggccgcttaaaaatttcgtcgcgctgtgaagcacgatatctacaccgagatcaagcggacgctgcagagcaggcgtcatgaatgtattgtcaaggtatgtcagacagccgtgttcctttgccagtttgacgacgcccttaatatccgtgatgccgagcgtcgggtttgacggtgtttccatataaatggctttcgtgttcggccggatggcgcaggcgaccgcttctgtgtccgtcatatcgacaaaggtatgttcgattccgaaacgggacagaacctcagtcaccatgcggaatgttccgccgtacacatcctccgtgacgagaacatggtcgccttgggataagagcagaaacgccgtcgaaatcgccgccataccggagctgaaagcaaaacctctcgttccgccttcaagacctgcgatcgtttcttcaagcgctgttcttgtcggtgtgcctgatcggctgtagtcatatgtcccgaattcttcaaatgaagactgatggaatgtggaagcatgctggatcgggacgctgacggctccggtggctccgtctgttttaaatggattgtgcacgagctgggtttccagcgtccaattgtgattactcatatgacacggccccctcttttacttgctgtaatgcctgctttacatcccgcttcaaatcttctgcatgttcaatgcccactgaaaaacgcagcagacggttgcagacgccgtttgcgatacggatatcttccggaatgtccatgtgcgtctgtgtcgcggggtatgtaataaaactttccaccccgccgagactttctgcgaaacagatcgttttcagcgcctttaaaaacggattgacccattcttctttttgcagccggaaagacagcattccgccttttccgggatataacacgtcggcgatttcctcttcctgttctaaaaattctgcaagttcaagggcgttttcttcatgacggcgcattctgagtccgagtgttttcatccctctcattaaaagccacgaatcaaacggcgggagaacggcgccgatcgcattttggtgattaaacatgatgtcgccgagctcttcatccttaacgacagccagaccggcaaggaggtcattgtgccccgctaaatattttgtggcgctgtgaatgacgatgtccgctcccagttcaagcggacgctggatgaccggggtataaaacgtattatccacaatcaaaagcaggccggcttctttcgtaatccgggcgattttttcaatgtccgcctcctgcattaacgggtttgtcggtgtttcaacaaatagcgctttcgtgttttccgttattttggagcgtaaacagtcttcatcgctgaaatcatcgtaaataaagcttaagccgtattttctccattcgttttcaaacaaacggtacgtgcctccatataaatcggaggatacaatcaattcatccccgcttttaaataaagccataatggtttgaatggctgccattcccgagctgaaagcaaatcctctcgcaccgttttccaacacggcgatggcgtcttcgacgagctggcgtgtcgggtttttcgtgcgcacgtaatcaaaacctgtagattctcctattcctctatggcggtaagcggtggacagataaatcggcggactgaccgttcccgttgcttcttcgcttctatttccgatttgggctaattttgtttcaacatgctgcgtcatcagtaagcaccatcctttttcaaaaataaaaaagccccctcttcataagaagaaggagcttttctcttcctcttatcttccaagcgtgaatcgcttgctggatttagcaccttggcactttgccttcccgcggcaaagcaaaccggttgctgaggtttcaaagggccagtccctccacctctcgtgataagaatattgttttgtattttctgattgttctatattaacgcactataaaatagatttcaacaactttttatttatctgaactctcgcaagaagtgcatctgaagaaagaaatttctaataattcatggtacaataggaaaaaaccatcaagacaagaagcggcctggaggaatgcgaagtggcatcaaaaaacggaatcattcatgagaaaacacttttctcccatgagcttgaagaggaaatgaccgttttggtctacctgcccgccaccttctcccccctgtataaatatcatacggtcatcgctcaggacggccatgattatttcagattagggagaatcgggcgtcaggcggaagagcttatgtcaaaaggggaaattgaccgctgcatcattatcggcgtcccttataaaaatgtgcgggagcgaagaaacacataccatccagaaggctctaagttcgcctcatataagcggtttatcgccaatgagctcgttccttttatcgacaaagaatacccgacttatcaagtcggatacggccgcaccatgatcggggattccctcggcggaaccgtttcgctcatgacggcgattgactatccgaatatgtttggaaacgtcatcatgcagtctccgtatgttgacgggcacgtgctggatgccgtccggcagtcggaggatctcaaacagatttccgtttatcatcaaatcggagaaaaagaaaccggcgttcacacgacggacggccaggttcttgatttcaccgcgccgaacgaagagctcaaacagctgctggaaagcaaacagtctgaatacacgtatgaaaccttcgacggggatcataaatggacctactggcagccgctcatcacgccggcgctgaaaaaaatgctgtaaccattcatttaaggagggaactttcatgaaatacggtattgttttatttccatcaaaaaaattacaggatctcgcaaattcgtaccggaaacgctacgacccgagctacgcgctcattccgccgcatctgacggtaagagatccgtttgaagcgacagaacaggaaatcgagcaggtcgtatcacagctgagacagacggcgaaagagtcgcatccgctcgttctgaaaatcacaaaatacagctcgttttctcctgtgaataatgtgatatatatgaaagcagagccgacggaggaattaaaatctctgagtgagaaatgctactcaggagcattatccggcgagccggaatacagcttcgttccgcatgtcacggtcggccagaagctgtcgtcagatgaacattccgacgtactcggacagctgaaaatgcaagacatttcccacgaagaagtcatcgaccgttttcacctgctctatcagctggataacggctcatggactgtgtacgaaacatttttattaggcggaggagaataactgcttggaatccatcatcgtaaaaactgaaaaacagctgaacgacgcttttttcgtcagaaaagaggtctttgttaaagaacagcacgttccggaagaagaagagattgatcaattcgaagacacgtcagagcatatagtcatatatgacggcggccagccggtcggagccggcagatggcgcttgaaagacgggcatggaaaattagagcgcatctgcgtaatgaaaagccatcgttctttaggcgtcggagccatcataatgcaggcgcttgaaaaagcggcggcagccaagggcgccggcagctttatcttacatgcgcagacgcaggcggtcccgttttacgaaaaacaaggataccgcgtcacatccggcgaagaatttctcgatgcgggcatcccccatctggaaatgataaaggaatacaaacaataaaaacaaaagcactcctgttgatatggcaggagtgctttttttatgaaaacaataccgtttcatgaattttattgcattttatggaaggttaatgtatgtttagtatacgaagtattacaattcatacaaaaaatacaattcatatttcggagggataaacatgacggcaccaaaaggaaaacacatattcgggactgttaaagtgggcacaaaaggacagattgtcattcctaaagaagcaagagatgttttcgatataaatccgggggattcactgcttatgcttggggatgaccagcaaggtatcgcacttgttaaacaagaactctttttcgagtttgcaaaagatattttaaacgctaagcaaatcgacgcagatagcgaggatgagtaaatgcacgcgattgagctgaagcaattaacgaaacattataaagaaaccgccgccgttgaccgtcttgagttctcagttgagaaaggggaatttttcgctttactcggtgagaacggagccggaaaaacgacattaatcaatatgctttgcggactcctttctccggatgaaggtgatgcatcagtgcttggacacagtatttcgactgatttggataaaataaaaccgaaattgaatatgtccccgcaggaaacagccatcgctcctcatctaaccgtacgggaaaacttagagtttatagccggagtctacggaattccgaaaaaagaagcaaaaaaaagaacagatgagatgctcgaattgtttcaattaaaagagaaagaaagagcaaaaaccaaaaccttatcaggaggaatgcagcgccgcctcagcatcgcaatgggcatgattacgaaaccggatatttatttcttagatgagccgacattagggctggacgtccgttcacgccgcgagttgtggaaaaatcttgagacattaaagggagacatgacgattattttaacgacacactatttagaagaggctgaagcactggcagaccgtatttgcattttagaaaatgggacattaaaagcactgggcacggcggaggatctgaaaaaacaaactcattcagccacatttgaagatgcctttttagcgatttgtgacggagaggcgggtctttatgcttgatttcgccattcgcaaccgcaaagagatttttcgtgatcccttatctatcatccttggaatcgcactgcctgttattctattgtttctgtttacggcgattgaaaaaaatgcgccgcttgatacctttaaaattcagcatttagcacccggactcattgttttcggtttcgctttccttacgatgttctctgcattgctgatcgcaaaagacaaacagaccgcccttttgacccgtttgtttgcttcccctttaaaaacagccgattatgtcatcggttacgcactgccgatgcttccgttagccattttacaaatcgtcatttgttttatcgcagctgctgctgccggtttatccgccgagtggatgaatcttctcgcaggtatcgctgtcttgctgccgattgcgatgatgtccgttttcttcggtttatgtttaggggctgtgtttacggacaaacaaatttcaggtatcggaacgatttatattacactcgtgcaatttctgggcggggcttggatggaggtgagcctgctcggtgacacattcaaacatatcgcttatgccttaccgtttatccactcgatcgagctggctcaggaagtcatatccggagattattcttcctttcatcagcatatttggccgatagcgggatataccgttttggcgcttgcacttgctttcctcagttttataaaaatcaggaagagttaaaaaagccggcactccgtaatgggagcgccggtcttcttttttacgtttctttcagaaggcttatcgtatgcggcagcagacggtcatcccccggactgccatggcccggaacgacaatgctgatgtcctgatatcttttcatgactttgcggacggcgcgcggccactgatccggataaaagcccggagttggtatgatttcctttgtttctaaagccttgattaagcaaccgccgaataagagcttatcctcaggcagccagacggtaatattgtcttccgtatgcccttttcccggataaaacgtttcaattttcatatcgccaaactgcagctttgtcacgtttttcaaatctccgagcggccggtcatatccctgctgccgggcgaagtcggcggtcagcttcgtgctgtgcacctttacaccgtatttgtacagtgtgttcagcccgccgatgcgatcgtcatgggcgtgtgtcacaatggcatcggtcatccttttgccgggaaaccgctgttttatttgtgtcattaattgctctgtgagactgtcattccacggagtatcaatcagtacgattcctttggaagtttcaagaagcaatccgttcgcagggacgggacttccgtctgccgtaccgatgcttgtatgcatccagacatgcggcgccagctgtgtgagagtgacatcttttgctgcggagctctccgccgcgtgtgccggtttcattccggcagtaaagaggccgaatagaaataaccccgcaattaataatgaaagctttctcaaattgaatcattcctttccgcatctttcatatatacggctcaaaaaaacccggagatttccgggctttttcacacatattgatttatcaaccggccttttcccataatttgcggcagacgggaaagagagcgcttacgtttttcctcatgcattttcttttctgcggctgcggtgttttcctggcggcgctccacctctctgtacaccctgtcattggcgagggcggccgctttcgtaatgccggcgtaatcaggcttataacccgctgcccggtttgcgtattgagaatactgctggttttgaatccgtcctgcataaatcatatgtacccctccccttcgcttttcatttcccttaatcttactttttgaaacgcggttcttttgttatgatattctttgtctatcaaatggatgaacaccttttaatgggaggacccctttttgaaatgcgcccgactgaataaccgaacgatacatttacatacatattctagagaacattaccaattcctttttgaagaagctcagaaaggaaatattttttgcgcacattgtgaccagcctgtcttgatgcggctttcgattttagagcagccggcattttatcaccggcaaaagggagacttcaccgcctgtgaaaaagcatgcgccgccgaggaaccacaagcggagaaagaaaaagaagagtataaggaggcaggcatgttccgcctgccgaaaggaaaagcgatttcagagaatccgaaaccgatcgtctcagaatggaaaagcccgaaaaaagtgcctgcggccgaaccgttttcaccaacatccgaggcagctgatacatctttgttccccggcatcggcctgaaccgcgaacagatgcgggcagtcacggaaacggacggccccctgctggtgcttgccggagcgggaagcggaaaaacaagggtgctgacagcccgcgccgcccatatgattgaacacctcggcatttcacctgagaatatgctgcttgtgacctttacgacaaaagccgtcgccgaaatgaaagagcggatggcgaatgagtacgggctggcagccggaaaagtctcccgtctcgtgaccggaacattccacagttttttctataaaatactctatcattatgattcttcaaaatggaacggcagccagcttttaaaaatggagtggcaaaaagagcaatatgtgaaaaaggcgctctatgaagaaaatttggatgaaaaagagtttcccgtcgaccaggcgctgcagcttatcggctgctggaaaaacacgtatctcccccatgagaccattccgcttgcggacgactgggagaaaaaagtgtaccggctctacgaacattacgaacggcagaagcgggaaaaacggcaatttgattttgatgacatggcccaaggctgttatgaactgtttcaaagccggcctgatattctcgcgcagtaccaaaacagattttctcatattttgattgatgagtttcaagatattaatcctgtccagtacaacattatgcaaatgatcgcaagcccggagaataacctgtgctgcgtgggtgatgacgaccaatccatttatgcgttccgcggcagcagcccgtctttcattcttgattttcaaaaggattatccggcagcaaagaccatttacttaacggcaaattaccgctcgccgcatccgatcgtctcaagcgctcatgccgtcgtaaagaaaaataaaaaacggtatgaaaaaacactttctgccgtcaaagacggcgttcacaatcccgtgatgttttatccttacgatgaagaagaagaagcgaccatgatcgtttcggatatgaaagagaaaattcaaaacggggcgagtcctgatgattttgccgtgctttaccggacaaacagcgccggacgggccatttatgaaagactgcaccaatcatcgattccttatcatgccgaccgtggcgtgcagacgttctacagccgcagaatcgtacgccagatcctcgcctacttatatgcgagtcagaatgaagatgatacggatgcggtgaaagatctgctgcccgccttatttttaaagcaatccgccctgcaaacgttaaaggcgctgtcaatcacggaagattgcacgatgattaaggcactgacgaaactgcctgacctgaagccttttcaaataggaaagatcaagcagatcgttccgtttttcgcaagcatccggacaatgaagcccgttgaagccatcacctttgcagaaagcaaaatgggtttttccgagtatttaaaaaaacggggcaatgagggaaacaaactggaaaaaggctctgatgatctcagggatgtcaaagtggccgccaaaaaattcaaaaccattcccgattttcttgcgcatgtcgatcatatgcgcgccgctgagaatcagaaaaccgatgaaaacggcgtcgaactgctgaccattcaccgctctaaaggtcttgaattcaatacagtctatattttaggcgcggctgacggctcgataccccatgacttcgcgcttgagacagcgagacagggcgatcccgctccgctcgaagaagaaagacggctcctgtatgtcgccatgacaagggccatgcagcatttatatgtatcttgtcccgcgtacaggcggggaaaaacagcgcgcagctcaagatttctcgagccccttcttcggacggacagacggagcgcactcaggatataaagaacccggcagatcactgccgggttcttctcacataaaaaggcctttttagcaaggccggctgacgcctatttattgtttaacattttagaaatggtgccaaaatcaagtttctctttaccgcttgtaatcgattgaacgattttgtcttccaattctttcggaacacgcttgttagccagctgggacaccttctgaatgacgcctctcaccgtgttttcatctttgaaattggcattttgcaatgatcctgcaaggttcatgacatccttcatgctgacgcctgttttcttctcaatatttttaaaaaattgattatccatggtgtgcctccttttgtggagtaatacgatattgtatgaataaagggcggaacgtgtgcccgtaagacaaggaaaaaattccgcatctccttctctatccttcatacattagggaagcacgggactgaacggtcccgcgcttatccaaagtcttgctaaggtttagccaaaaaaggatgcaccgacaatgatcagaaggatgaacaatacgacaacaagaacaaatgttgagccgtatccgcctccgacatagccgcctccgtatccgcagccgccgccgcagccgtaaccgccgtagccgccgccgaatccgccatatccgaatcccatatttaagcacctcctttactctctatactctatgtgagccgacttgtttggcttggataaatgcatagggccggtgcggatttcttttcattttattgagaatgctcatttttcttcagtttcgcttctgtttcggcggcaaacacatctatccattcctcaaagcgcgctcccgcttcatcaaactcagacagctgtttttcaatagataagatatagttgtcatgctcccgctgattttgattgtgccggcggtatttaccgtttatgaatgattcaaatatattcataacatcccctcctcctatgatctatgccgggcagaggccggcgttcggcaaaaaacaaaaaaaccggaagctccggttttttttgaaaacggctatttcggttttttcttttggccgcagccgcagccttttttcttaatttttttttcgtaaggctgatgcacagttgatttgtatggagagtgttgggaaggtttgcttgattgattcatggtgatccttcctttccttatgtcatatatgccagtttatgccgaaagtgacggtaagttgctggtggaaccgccttattcctgcagaagacgagaaaccgcagcttcaatgatcccggccgcgccggctatggctaacagcaaaatcagccattgcgcagcctcggggatcacaatctgcgccgcaattaaaaaggcggcgcaccatacgcccgtacaccaatagcagctgagaagttcaccgataaatgccctgatgccttttccttttatgacaatgtaggtttctgtcgtgccgtcgggtgcggtttctgttttttcctcgtgaaaaaggctccgaagcggcgccataatggtgtcaaatacgaaaagcctggccagccggaaaacggcaaacgataacagaataaatgaaagccaattgataaccacctgttcactccttttcaaaacttgacctctttatacatatgcgaaaaccctgatcttcatgaatcgcaccttgtccggtaaaaaaataggtgcggtttagttgtttttcttattccgctcggcgtttcatttgcattatatagagtatgaatgagaaaggagtgaaggttatgtcgtttgaagaaaaagtcgaaacactgcaaccgcaaatatacgaacaattatccaacgaattcgagcagacgatcgaagtgattgattgcgaaaatgtcacaatagatacaacacatataacggccgctctttctatacaagcctcagttactacggcgattatcctcgcgacacagctcgcgatcgcagatgaagacacagccgaccaaatcgcaaccgaactgctgatcctggatgattgccaaataaaaaagaggaccgtcattcaagtcctgaacagccgcaatattaaaatcacactgacagcagacgatatcatggcctttgtacaaattttgtttcaattattaaatatactttttgctgaactagacatcctttaacctttcttttcaaatatttaaatagaggtgagaacaaatggcagataacgaaaaattaaaaaaagaactcgaaaatctaccagaagtggatccgcttttaaaggtgcttgtcagcaatgtcttcaaaaaacacggcgtgacaaaggataaaatgcgggaaatccctgatgaagaaaaagaaatgctgatcgcattagtcaaagacatgcaggcgaaaacagaagcttttcttgaaagccagaaacagaaaaaagagcaggaaaaagcgcaagaacagcagacaaatccgcaaacccgcagagaacaattaatcgaacagctccggcaaagacgccaaaatcccggtcaataactaaaaaatagtgatttttatcaggatagatgcctgagtcaaaataaggggccggctcatttaataatagtaaaagaaaaggaggaatagatatggaaagcagaccatactcttgggttgcacttgatcctgaatgcgaacatccgcgagaagaaaaagaagaaaaagaaggaagaagatgcagtgtttgctgtaacggacatggatttggcgaagataatgccttccttgaccaagacctggctcaggcgaatatcaacaaacaagtttctgaagaagcgattattatcagagactcttgtgatattaacgtaacgtcaacagacgttcaagcagtcgcttcagtcatgacagcgattaatgcagcagtcgtaacggccactctcacttcaattgctgacggagtcatcgctgaattggtcgcacaagacttattgcagctaacagctaacaaacaaatcaaccgtcaaaaattgctcatcgaaaactcccgcggcgtaaacgtgacaacagtagatgccgatatcgcagtgttgatctcaacagcgacaaatttactgattgccgtcttagtcatcacccttgtcctctaaaaagaaaaagcagagctaaaaatgctctgctttttcttattttctccgcatatgatgaatatatagacgttcacccacaccaagtgaggctcgcgtacatatgttgttaaagacaaaagtcaaataccctaaaagaaggagctgaaatccatgagctgcggaaaacaccatggccgagatgaaagttgtgtatgcgatgcagtcgagaagattttagcagaacaagaggctgttgaagaacaatgcccgactggatgctataccaatctgttaagcccgacggttaccggtaaagataccatcccgtttctcttgtttgataaaaaaggcggtttgttctccacattcgggaacgtcggaggatttgcggatgacagccagtgcttcgagtctattttcttccgggcagaaagagtttgtgattgctgcgcaacgctttcagtattgcgccccgtagatgtgcacggcgacaccctcagcgtctgccatccttgtgacccggatttcttcggtttagaaaaaacagatttttgcattgaagttgatctgagctgcttcagcgccattcaatgcctttcaccggagcttgttgaccggcctgagccgcacaaagagaaaaagcatcacggatagtcattgattcgcatctttcctaaagaagaatccccttccaaccttctattacagatgcaatcatcagcccgcccggacttccgggcggctgactctccgatatcgtttaatccggtatataaaacgtgaagtcaggagggatattatgagcaagcatacaacatactgtgtgcgtgaagcggtagaaaatattgaagacctgcaaaatgcggtcgaggaagattgcccggccggatgctattccaaccttttatcgccgggtttttcattaggcgatacagtgccgtttgtacttttcacttctaaatcatcaccgtttaccgcattcggaaatgtcggcgagctggataacggtccgtgttttaacaccgtttttttcagagttgaaagggtctgtgacggctgtgccacattaagcctgcttattgcttttgacgagcataagcacattcttgattttacagataaagactctctctgcgatgtattccgtttagaaaaaacgaactattgcgttgaagtcgatctccatagcttctgcgccatcaattgcctgaacccgagactgatcaaccgcacacattcttaaatcaaaaagcataaaaataagctgccggattaaagaattcaggcagctttttgtatggttaaaatccaagcggatgcagcgaggtaatatcgtctattgcgagttctgccggcgctccgttgcttgtcgtccgcaggaagatcgcattattttttcttccgacgattacgcctctgtaggttttcccgttggcttctatcagacaaagggtccgcggcatattatgcggcagcttcgttaagaaatcaattttttcaagaatggacattctgctcatcggctttttcacgcgctttggcgggaccttttcctctggggcggcattgtgaaccgcttcaggctctttttcagcggcttcaggctcttttttagcggcttcaggcttggcagtgtcctgctccgcttgcgccggaacttcttgaacggcttcttctgagcggctgtgctgttcaggtacttgcttttctggttcgacagccactgctccttcaggctgagttttacattcttcctcccgctttccatgcatcggctcttcttccggcggctgcggcgctttcctttttttgattaatatgtcctgcattgatgattgcgtgtctgaataatccgcctgaacaatatacatgagcggttttttttccgcgtttctgttttgttttgacatcttcatccctccgattctgtcatgttttatttatatgacggaatgattaaaatcagaagaaagaaaaaagcaatccctgaaagggactgcttgttatttaacgtgcggtaatatggaatcctgaatccacgtgaagattttcgcccgtgatgcctcttgacaggtcactgaacaagaatgcagccgtgtcgcccacttcttcaggtgttgtcgtgcggcgcagcggcgcgcgctcttcaatttctttcaggatagagttgaaatcactgattccttttgcagacagcgtacggatcggccctgctgaaatgctgttgacgcggatgttttcttttcctaagtcagcggctaaatatctcacgctcgcatcaagagacgcttttgccacacccattacgttatagtttgaaacgacgcgctctccgccgaggtaagtgagtgtaacgatgcttccgccttcagtcataatcggacgcgccgcttttgcgaccgctgtcagagagtaagaactgatgttatgcgcaagcaggaatccttcgcggttcgtatttaaatattcgccgacaagctcttctttgtttgcgaacgcgatgcagtgcgcgatgccgtgaatcacgccgacctgctctttaatgcttgcaaagcaagtttcgatctcagcgtcatttgtcacatcacacggaaggatgatggaatcatttctttctaatgtagccgcaaggtcatgaactgatttttccaagcgctctcccgcgtaagtgaaaatgaggcgcgctccggcttcatgcagcgaacgggcgattccccatgcgatactgcgtttattggcaacgcccatcacaacgatgttgcggccttcaagtgagaaattcatatgtataaagcctcctgtaatcgtcttaaagacatagttttagtacctgatcttaatttttatcatatcataaccttgtccagattgaaagcatgggaaaaagaccgcggatgttgaagcggtctcttttttatctcgtctgcagactgttccttttaaaggcaaaatgattggtcgggccgtgtcccgctccgatgccgagtgtatgttccacggcttcccgcacaaaattgacagctgtctcaaacgcggtctgaatgtttttcccctttgccgtttctgccgtcagcgcggctgcgaacgtgcagcctgttccgtgggtgtgtttcgtgtcaatataagcgtggctgatttgggtaaaagacgaaccgtcaaataataaatcaacgattctcccctgttcaggctgatgtccgccttttatgatgacatgctttgccccaagcttgcaaaggcgttcggccgcttttttccggtcctcaaacgtgcggatttccatccccgtcaatacctcagcttccggaacattcggcgtcaccgcatagctgcgcggaattaacagctcttttaacgcggcctgagattcctcacgcagcagggaagcgcctcctttggcaatcatgacgggatcggtgatgagatgatcaagcccgtactgatccgttttttccgcaatttccgcaatcatttccgcgctccacagcattcctgtttttacagcatcaggccgcaaatcttccgccaccgcgtcaatctggctgcccagcgcctcccgggtgagcggataaatgccgtgaacgcccaacgtgttctgggcggttaccgctgtaagggctgacatcccgaaaacgccgagctcctgaaaggttttgagatccgcctgtataccggcgccgcctcctgaatctgatccggcaatcgtcaatgctttgcatatgctcatgatgtttttcgctcctttcacattatccgatccatttatgataaaaagatttcgctctgctgatatcacttgtgccgtgtattaatgctctgccgtcacgaaacagtaccatcttgaaattgtctgtgcaaaatgaaattaaatacgggttggctgaaacatcaagccctgcccgtctgagctgtcccgcaagattttgcagatcaaactgttcggaaatccccgttctgatctgcaccgtgttccgcccgcacagaaccgccgcttttgtctgattttcataggataaaaacggaaaatcgtttgtgccgcagcttgggcaatcagccgacttaagacgggcgacgtttatttctgaccgttcatttttccataaatcaaaggaacggagaacatgctcgatagatccgcccgttaacagcttcagcgcatctgctgcctgaaaaacggccgtctgcaatacagccgggctgatgattcccgccgtatcgcatgtcataccgcctaaaggcaatgtctcaagcagacagtgaaggcacggcgtgacaccgggaatgacggtaaaagagagcccgtagctgccgacacaggcgccgtacagaaagggaattcctttctgcacagccgcatcattcacaatcagcctcgtttcaaagttgtcggcggcatccacgatgagggaggcatcacgaatcaatccgggtgcgttttccgcagtgacatccatgacaaatccctcgacctctacatcgctatttatagaccgaagccgtttttcagccgccgcggctttcggcatttcctgtctgacatcgtcttcggtataaagctgctggcgctggagattactccactccacataatctctgtcagcgatcgttaccttcccgacccctgctctgacaagcatctccgcacttgccgtcccaagcgcacccgcgccgataatcacggcatgagacgaccggagcttctcttggccggtgggaccgatcggctgaaacagctcctgtctggaatatctgtccgtcataccggaagaccgtctcgcggactgcttgcagttccgtaatctttcaccggaattctcccggcttcataagaaagacggcccgcttctacggcaagcttcatcgccctggccattttgaccggatcatctgcgcctgacacagcggtatttaacagcacgccgtcagccccgagctccatcgcgtaggcggcgtcttttgaagatccgacgccggcatcgacaatgaccggcaccttcgcctgttcaatgataaaagaaagattcagcggatttaaaattccctgaccggaaccgatcggcgaagcgcccggcataatggcatgcaccccgagctcctcaagacgtcttgcgagcacgacatcatccgacgtatacggaagcacgataaatccctcttcgagcagctgttctgatgctttcagcgtttcaaccggatcaggcaaaagtgaccggctgcatccgatgacttctacttttatcatgtcacaaagccctgaagctttggcaagccttgcgattcggaccgcctcttcagccgttgcggcgccggccgtattcggcagaagcgtgtatttagacaaatcaagctgttcgagaaagttaggctgagactcttcaaagatgttcatccgccgcaccgcaaaggttaaaatatctgattccgagacggccaccgcctctttctgaatctcaaaactcggatattttcccgttcctaacagcaatcttgaccgaaactgttttccgcctattgttaacatcctcatccgcctcctacaaaatggacaatttctatgacatcgcggtcacacaaacttgtattttcataattctttttttcaatgatttctttatttctctccacaactacgattctttggtcaagctggtacgattcaagcaaatcctgaaccgtcccctcttttcgattccaatcaatttgttttccgttcagctgaaggatcatatatgaacagcctccttgcgatcgattcgaaacgcttcttcccattcctgtttaatctgtctttccatgatcatatcccgcaccatttcagccgttgccggcgccaacaggatgccgttccgaaaatggccggcggcgaagatgatgccgctgtcttcagggtgttgcccgataaacggcttgccgtctcttgttcccggcctgagccccgcccaaaaccggtctattttcatatgttcgatggcgggaagcatggttttcgcttttgcaatgacggcctcaattcctccgatgtcaggcgtatcgctccagtcgccctgtttcatcgtggcgccgatgacaagccggccgctttttctcgggacgacataacaatgatcatggtaaagggttttggtcagcggggtatcgtcattccacacggaaaggcattctcctttcacaggaaaaaaaggctgtcccaagccgagccggctgaaaaaccggccgctccatacaccgcttgcaactgcgactttgtcagcataaacatccccgccggacgttgtgatgcaatattctccgttcacccgttttacggaagtgacttgtgtgtgctcatatatgtcagcgccatagcgccgcgctccttttgcatacgctttgcaaacatagtacggttcgacatggacatcgtcttttataagacttgcgccgagaatgtcttttgaagcgtaaggctctttttcaagggcatcttccgctgaaagccaagtgacggaaggcagatcatccatcttccgtaaacgggcgatatcttcttcggtatacgccagtttaagcattccgccgttatggcgcctgatgtcaatgccgctagcttcctcaagctcttgccccgccgcttcatacagcctttgactgtgcatggcaaaattaaaaaacgcatcccggttttcacattccgcatgagcacccagcattcccgcggcagcgcttgtcgtttttcggccgacttctccggcttcaaacaagacaacgttctgctgcgtcttcgccagctcataagaaatggcacacccgataattccgccgccgatcaccgccgtatcatagtgctgcttcataatcggcctcccttaccgcacgtgcataccgttttgccgcctcctcgggattttcagctgagaaaatgcctgacatgacggcaattccgtccggcttcgcctgctttgtgtgtccgatcgtctgcagtgtcattccgccgattgcgataacggggatggaaagcgtgcgtttgatctctgaaagcaggctgatgcctcttgcttcaagtccttgtttacattcggtttcaaatatatggccgaacaccacataatccgcatcttccttttcagcttggatggcttcttccagcgaatgaaccgaacgtccgatatgaagatggggaaatctgcttcgcacctgctttacggaaaagctgcgggacggaagctgaacacggtgtatgttggcaaaaagcgcgatatccgccctgtcattgatgatcaatttgtccttatccgcaccgccctttttcaaaagggacaaaagctgcatgatctctcccgctgttttatcccgctcacggatatggataaagcttacttcgcgctgaatcgatagaatatcctcggccagctcggcaacgggtttgcgattatcagttaccgcgtgcagctccaaaggattccacctcttttccgtccttctcggaccagccttctttttgataagccattccccaaaattgatattcataatagcttgaaatcacaaaattctctttcattttcgcgcggatttcctctgtgctgttttcagcaatctcgtcaaaacggctgatctgttcttcgacctgctgtctgaaccagtctccgccgtatgtaccgatccatttttcataaatcggatgctccggtttgcactcttttaggtgttcgccgacttcataataaagccaataacaaggcagaagcgcagctaatatttctccaaaattgccgctcatcaccgacctgtacatatgagacgtataagaataggcggtcggtgccggtttaaatgctgcacgctcttcttccgtaattcctaaaagctccgtaaactcgcggtgcagcgccatttccgcttcatatgtcccttgagcgtggcccgccatcctgcccgtcgtaaacaagtcttcggcatatgcggcgccgaacgcctgaacttttgcaaaatgcgtcaaatagtaggaatcttgcagcacgtaatagctgaaacggtctatcggcaggcttccgtcaccgattcccgttacaaacggatgaacaaaacttccgtcccaccattcggcagccgcctgtctgcattcttcagaaaatgtcatcatgtcttcccccctgataaaataaaaaaaccactttcccgcatcggaaaagtggtttggaatttaaatggataaaaggaaccccaaaaaaataccgctccacttccctacgcaggtctgaacctgttcaagttatgagggtctaaaagtctcacttttatctcagcccttatgaaggacacccctagtggtcatacgattaatgatttatttgttatgccttctatattatcacgaattgcaatttggtcaagcttcaaggatttttctcagttctgacacgtagttgcgcgagcctgtgacgatgagacggtctcctgttttcagccgtgtgtctccgtgcggaacgatgctgtccacacctctgaaaatccggacgaaaatcacatcgcccatcagcggaaattcccgcagaatgatgccgttatacgccgggttttccagattgatctgatataacgaagactcctcattcgtcaggaggctcatcacgcccggcgcctcaattaacgcgcgcagcagcgtttttgtagacagaaggatagaaaaaatactgatgccctcttctttcagttttgtttcatgctcaaccgagccgacgcttgcgatgatacgctcagtccctttctctttcgctagtaaggcgatttcagcgttcacatcttcatttcccgtcgccacgacaagaatatccgttttgaaaataccgtgcgactcaagcgtgccgggctcgtaatcagaaatcgtgtcaaccgaaaaaacggattccgcaagcgtttccccggcattttcctgatacacatggacgacccgtacttcatattcctcctcaggcaattccagcgtaaccgggagcgtcatttggttggcgccgataaatgtaatgcgctttttttcctgcggcgcgctttgccgtttgaataatttcttaaagccgatcggcgtgatgatgctggcaataaccgcaactaaagtcagcgcgccggacatattggcgctgataatgtggagcctttctccgatcgtagccgccgcgataacaagcgacagcgtggacgtcagcaaaaagcccgaagcaaacacggttcttttgtcgtaccatttctttaaataaaacaccgggaacattttgctgataaacagcgcaagcagaagcagcggaatcatcgttaatgttttcggatcttggaaaagcgtccaaatatccaatttcaccccgaccatgacgaaaaagatcggaattaaaaacccgtagccgaaggaatccagctgttccaccatttctttattcggagacagaagcgataccagaacgcctgccaaaaacgcgccgagaatattttccgccccgagagattccgataaagcgacaagcacgataatcagtgtgaaaatggctctcgtgccgatctgcacagtgcctttagacatcgactgcacaaatgaacggtgtttaaagatcctgccgaagaaatacagcacgacccccgcggcaaagagaatcaacagaagccacatatttccgctgtcttctccgtaaagagaagagaagaaagcgagcagaatcattgtagccaagtctgcgataacggcgacaagcaggatgatctggccgatattggagttcatgatccgttcttcctttaaagtcgggaccaccacaccgagtgatattgttgaaataataagcgtcattaaaaatgcgttttgaataaaaccggctaatacaaaggcataggacagcagcaatgataaaataaagatgccgaaaaagataatcagcgcggcagaaaacgtgttgggcgcttccttgccgttcggaaggaattgttttttcttccctttctcaaatgaagaaaaatcaatttccaagccgcttaaaaacattaaaaagataaagccgagaacagacagcgtctccagccacgtgtctccctgaacgacaagattcaggccgctttttccgataataagccccatgatgatctccgcgacgacgacggggatgctgagcttaaaccgatgtaaaaggagcggcgtcaaaaaagcgacgatcagaacgacgactaaagatgcgactgatgtgtgttccatttgtaaatacctccttaaaacaagggttataaaagcccgctttaagcggacgaaaccttactttttttaaaaacataacgcatattctaacaaggcttaacgcgaaaaaaaagtgataaggctttatttcttcaattctttttttaatttgtaccaaaacagcgtaattaggtataggaattagccccataataaataaaaaaccgttaataaggaggctgacacgaatggcttatgacatcatcagcgatatacacggatgttatgacgaaatgatcgccttaatgcaaaagctcggatatgaagtgaaagacggaacgcccgtccattctgaaggcaggacgcttgtctttgcaggggatttaacggacagaggcccaaaatccgtagaagtgatgcgttttgtggcaaaagcatatgaaaaaggagccgtccgttatgtcccgggaaatcattgcaacaaactgtatcgttacttaaaaggaaaccctgtaaaagtgatgcacggactggaaacgacggcagccgaactgaaagagctgtctcccgccgacagaacggaagtctccggacaatttatccgattatatgagtcagcgccgctttatgacattttacataatggcgatctcgttgtcgcccacgccggcataaaagctgacgatatcggtaaatactcgcgtaaggtaaaagaatttgttctgtacggcgatattacgggtgaaacgcatcccgacggcagacccgtcagaagagactgggctgccgactatgaaggcaaggcgtgggttgtgtacggccataccccggtaaaacgcccccggatcgtcaaccgtacggtcaacattgatacaggctgtgtcttcggcaatcagctgacaggctttcgttttcccgagcatgaaaccgtctctgtggaaagctctatgccgtatgatgcttcacgatttcgcgaggatcacggcaggcaggcatgaaataaagcccgaaaccggcaaacggttcgggctttacatgtgttcaattaatgttttcatatcgtcaggcaccggagcgtgaaaaacgagcgtttctccggtcatggggtgtacgaatgaaagccgctcactgtgaagagcctgccgggcaattccctcattttttccgccgtacaatgtatcaccgactaacggatggccgaggtagctcatgtgcacccggatttgatgcgtccgccccgtttccagccgcagggctgcaagcgtaaacgcatgtcccgctttttccgtttgaaaatgcgtcaccgctcgttgtccatccggcgttaccatccgctcaataatactgtcgtgttttcttccgatgggcgcgtccaccgttccttccttctgcagcatgatcccgtgtacgacagcgagatatcgcctgctgacaagcccctttttctgtgctgccgacaaaagagaatgggaaagccgatgtttggcgatgagcatcgcccccgatgtgtccctgtcaaggcgggtgacaagatgaaccgttgattgcacgccgctttttcggtagtggctgatcactccgttagcgatgctttttgacgggtgttctcttgatggaattgaggagacatacggctgtttattgaccacaagcacatggtcatcttcataaagaatatcaagcggaaccggctcaggcaaaagcgtttcactcacatgctccttcggaaattcaatcttaagcacgtctccctccgctaacacggtgcggacggttacatgctctccgttcacaagcaggtctcccccgccgaatttaatgtcagcgagaagccgctttgaaatgccgagctgcgccgtatattctttaaccgtcatgccggcatcccgggcagtcatgttcttttggataaaaaagttgtccaatccgtttcctctttctattcgccttttccgataaaggaatcctgcacccttttccaaaacggaaaagggcggaatcttgcaaatctgactttttcatttgccacacggcatagaatggacttgacatccttatgcagcaaggttaaatgatcaattgtgacttgaaagtcgacgtcgtttctcggtttgatgacacagttatgatgatcgggaagcaaaagcggcgagccgacagtcctgaacactctgttgttgatagatgccatttcggcaagctgaatcgccctgatggaagggtggatgattgcaccgcctaacgccttattataagccgtgcttccggaaggcgtggacagacataaaccgtctcccctgaacgtttcaaacagctggcctttaatttccacgtcagcgacgagactgccttctatgcttttgatcgtacattcgttcaaagccagataccgctcctcacgctcttcatcatgataagtgacaatcacctcaagaaggggatactccacggtatgatacggcgttttggcaatggccagaacgagcttttctatctcctgcggaacccaatcggcataaaaacccaaatgccccgtgtgaactccgacaaaagccgttttatcaagacggtcgctgtacctgtgaaatgcgtaaagaagcgttccgtcaccgccgacggaaataacgatttccggctctttttcatccaaggtcatatcaaaatcgagtaaatacgcctgtattttgcttttcagtgtatctgaaacctcgtctccttttgaagaaacggcaaatttcatgccattcccctcctttccttcctactggcggtctcccgcttttttctttcgcgagaacgcggcttgggcttcctggatttctccgcggatttctgacatttcttcatcgagccgggatgcggcttctgaggcccgctgcagcctcagctttactttttcgggaatgttcccgctgtatttgtaattcagtgaatgctcaatggttgcccaaaagttcatggcaagcgtccgaatctgtatctccacaagaacgtgcttttcaccggacgttgtttgtaaaggatataaaacgacaaggtggtaagaccgatatccgctttccttatgctctgctatgtaatcccgcttatcgacaacggtaaaatcttttctggcaaacagcatatttttgacgatctggatatcatcgacaaattggcacataatacgcagccccgcgatatcctgcatcgtttcaatctgatgaagcggtatgctttttcgtctcgctttttcaagtatgctcgccaccggcttcacgcggcctgtcacaaactcaatcggtgagtggtcatcttcatactcataaagggttctgacgcctttcagcttcacctttaattcttcaacagcctggcggtatggcgctagaaattgctcccattgtttgtcatccatcgtacatcccccaattccgaacctgttctaaagaaatacgtttttcactttttcttccatatctccgtagtttgcattatctttaatattttcaagaagataatcgagttcttcatgcagccctgaaagttcaaccgttttcgcgccggcctcaaggaccgccggttttccttggtctaaggcttctttcagatccggccagacatgttcttttataatgacatattcaaaagagtcagctgattcaagtatgtatacaaaagcaaagtgatcggaatcaacaagcatttgacctgaggctttgcgttccgctccgcttaagtcttctccgcacttcaagcggagcgcgtcttctgttaatgatgcattctggatttcaattctcttttgcataatgttctccttttttaacaaagtacagcatttattttatcatatcaaggtcgatattgataaacgtaacctctaaagagataatgggaattatacaatttttcgtcctgaaaggaagactgtcatgacccaagaaatagaaattgaattcaaaaacctgctgacaaaatcagaatttctgaagctgagtgaagcactctgcatgaaagaatatgattttaaacagcaggtcaatcattatttcgacacgaaagatttttccctgaaacaaaaaaaatcagcactccgcatccgagaaaaagacggctcgttcgttctgactttaaaagaacctgccgcggtcggtctgctggaaacgcaccaacagcttgcggcggcaccggatcttgacgtcttcaagattccggatggccccgtcaaacggcagctggacggtctcggaatccgttcagaacacatttgctgcttcggaacgctgtcgaccgcacgcgcggaaaaagaatcagaaaaaggcttaatcattttagatcacagccgatatttagagaaagaagactttgaattggaattcgaggctgctgactgggatgaaggaaaacaggcgtttgaacaattgctcaagcaattcggcatcccagagcggatcacgaaaaataaaatccagcgtttttatgaacagaaacaaaaaaaggtggaatgacacagtgaatataacgaattgggcggcccttctccagctgcagtcaatggcgctgcaatcaatctctcatacaagcacggattcaggcggacaatcttcagaaagcccgcttgccaatttcagcgcgctgctcagccagtatacggacacagccgtccggcagcagccggaatcagggattttaaacggtgtgcggaccgctcacgcttcatattcaccgagaattccggtttcatccggttccgcggcagcttcacagaccgtttccccgagcataaagtctccgaatgcggcttctgacatcagcaccggaaacttttcaatagacagcgccattcagaaagcagccgaaaaatacggagtggacgaaaaactgatccgcgcggttattaaacaggaatcaggctttaatccgaaagcggtcagcggtgcgggggcaatggggctgatgcagctcatgccttccacggcagaatcactcggggtgtcaaacccgcttgatcccgtccagaacgctgagggcggcacaaagtacttaaagcagatgctcacgaaatacgacggaaatgtatctctcgcgttagccgcctacaacgcaggccccggcaacgtagatcggtacggaggcatcccgccgtttaaggaaacacagcaatatgtcaaaaacataacccggcagtattacgcgtaaaccagagaggcttccttcgccctctggtttttttgcggagtgaaatcttacacatgaatgaaggcgatgtgatatgatatgaaatacaagcgcctgacagaaaggcactttgtttgtagaaataaaatgttattgctaaaatatacagtaactgaagatagtaaaactgaaagataaattcgcaatgggaattatgattcctattagccatataaaggagtagtcaacatgggacaatcgtttaacgcaccatatgaagcgattggagaggaacttctatcgcaacttgttgatactttttatgagcgtgtctcgtctcatcccttgctgaagccgatatttccaagtgatttgactgaaacggccagaaaacaaaagcaatttttaacccagtatttgggcggacctcctctttatactgaagagcacggacatcccatgctcagggcaaggcatctcccctttccgattacggatgagagggctgatgcgtggctaagctgtatgagcaaagcgatggatcaggtcgggctggagggcgatattcgtgaatttctgtacgggcgtctggaactgacggccaggcatatggtaaaccagtcagaagcggaggatcgatcatattgacgaattatcagcatgagcaatacttcgcccattgccacggacatccaaaaaaaccgctcgaaatttacatgtttgtcgaccctttatgtcctgaatgctggtcgctggagcccgccataaaaaaattaaaaatcaaatacggacgttttttcaccctgcggatcattgtttccgcgagcattacatcgctgaataagcaaaagcggaaaaaacaccttcttgccgaagcttgggaaaaaattgcgaaccgttccgggatgccctgtgacggaagcctttggcttgagcaggatcagcctcttgcatcgccctaccttgccgcactcgctttaaaagcggccgaactgcagggaagaaaagcgggcattctgtttctccgcagcatgcaggaaagcctgtttgtctccaagcagaatattacggatgaagacgttcttttagaaattgctgaaaagacgaaattggatgttgaagaattcaagcgcgacctccattcgcaaagcgcggtaaaagcgcttcagtgcgatatgaaaatcgcggcggaaatggacgtcaccgtcaacccgacattgacgttctttaacagcctgcatgatgatgaagggctgaaggttcccggcaactattcttatgacgtatacgaagagatcttattcgaaatgctcggggatgaaccgaagccttctgaaacgccgcctttggaatgtttcattgaatatttccggtttgtcgcatcgaaagaaatcgcactcgtttatgatttgagtctagaagaagttgaaaaagaaatgaaaaaactggcattcgccaaaaaggtcgccagagtggaagcaaagcacggtctgttttggaaatctctggccggaacccaggaggatgtcacctgttgtgaccattaaaaaaagctgattccttacggagccggctttttttgtgcaaataaagaaaccgcgccgggataagcgcggtttcatatgtcttaacgacaacaaaggggatgggagaaatttttcacggtcaaacaaaggggtaatgtttgtttgtgatcaatttcacatccttatcatatcaaatcttgtcgagttttgacaagccataagattaatgttcatatttttgtcacaaaacataactgactgcttgttttcatagaatatatcaatcataaacaaggagggaaatcaatgctccgcaccgtattgatcatcggaatgattgtgtttttcttctttttaaacctgctggccatgatgcacatgctgccgatttacattacatctccactgctgtttctgtccatattgtttgccctgtaccggctgaatcaccgaaaaacgtttaaggggttttagaaaaagcctgcgcatttaatgcacaggcttttttgaattacgaagggttcactttcgaaagaagctcttccatttcgttcagtttctcttcaaacattttgcaggccgcctcgatcggttcaggcgatgtcatatcgactcccgcttttttcagtatgtcgatcggatattccgagcttcccgcttttaagaattcggtatagcgctccaccgcaggcttgccttcttttaagatctggctgctcagcgcttgggccgcactgtagcctgtcgcatattgatacacataataattgtaatagaaatgcggaattcttgaccattccagactgatttctttatcaatcaccatgttgtcaccgaaatactttttattcagatcataataaagttcgttcagcagttcaggcgttagcggctcgccttcctgcgctttcgtatgaatcagatgctcaaattcagcgaacatcgtctgtctgaacactgtgcctctgaatccttcaagcatgtggttgagcaggtacagacgctgtttttcatcctttaagctgttcagcatatattcaccgagcagcgcttcattagtcgttgaagcgacttcagcgacaaaaatgctgtagttaccgtacggatacggctgatattttctcgtatagtagctgtgcacggaatggccgaactcgtgaacgagcgtaaacagattattgacattatcatgccagttcatcaagatgtacggattcgtgccgtatgtaccggacgaataagcaccgctgcgttttcctttgttttcgtatacatcgacccagcggttttcaagtccttcttttaaaatagacgcgtattcctcgcccagcggagcaagtcctttgagcatataatctttcgcttcctcatatgttaccttcattcccgaatcttttacaagcggtgtgtacaggtcataaatatggacttcatcaaggccgagcacctttttccgcaggtcaatgtaacggtgtaataacggaagatgtttattgatcgttttgataaggttatcgtaaacctcttcaggaatgctgttattggataaagccgcttcccgtgctgatttatactttttcacacgggcgtaaaaattatctttttttacagtgccgctgagtgtagtcgccatcgtgtttttatactgtccgtatgttttatatacggcttcaaatgcgtttttgcggacttcacgattgctgctttccaggaaattaataaagttgccgtgtgtgatttgagtttccttgccgttttcatctttaatcgacggaaacgtaatatcggcgttatttaaaacactgaatgtattggaaggcgaagacagcgcttcagaggcttccgcaagcagggcctcttcttgttcgctcagcacgtgcggacgctgttttgtaatttcttcaattgcatgggagtaaagcttaagctcctctttttcaagaataaactggtgcagcttgtcctcctgaatcgccagaatttccggttcaatgtaagcagtcgcgctggcagcctgagaatacaggcttgcggctttgtcgttcagcccttggtagaaagaatttcccgtatcctggtctgagcgcatatgtgcgtatgcataaagtttcccaaggcggttcgtcacttcatcctgtgccgtaagcgccgcgtataaattatcagccgaatgagcaagcgtgcctttaaatgaagataaattcggaattaattctttaactgcttgaaattctttattccaggcctcatcactaggaaaaatatcctctagtctccatgtatgctctgcctttacttcacttctctcaggcagctgtgctgctttattttcctcagtcatggtgatccccctcgttttctttacttcaagccaattgaaaaaacgattgtttctccaaaaacttgtgttgtgattatcttccggcttttcactgccttttgtcaaatcatatgcggcatataagaccgagcataccaataatacagtgaaaaaacgaaaacaaaatgcttgtacgcccctcacattcgccaccaccttgacgttagggtgaacgaaatgaagcattctcattccccaaaaaagagcaggtcccgccggcgcagctcttctgccgtttgagggcgcttctgttgagatgagggcatatatacttcattctcaatttcccttaaaaaatcctgcaagcataagaaatcagcatattgttttaccgccattccgataaggctgtcttgtgaaccataccgcatccggatctccttatgcctgattttttgccgtaaatcatgaaccatgccggataatcggatcggcgcgccttttttagaaagttccgcaagccgcaagtataaatggccctgccacacaaaaacgggacttgcaaacacaaagcctgctgaaacgggaataaacacttcagaggggagaaatggaaatgcaacctgatgtctttcgtaaaaaagacgccggataagaccggcatcttcagataaaaaccgcccgcctttgttgcggaagccggtaacggcacgcccccacgaggaaagtctgacgctgcgccgcccttccggatgacaaatgtctttcagatttgctttgtgaagagggattgcggttaagccggcataagaatagccggtgtaaaacggagtgatggaatgcagcctgtaaaaggagcgggcgtcggggcagtaaaacattaaggaggaaaatgaattgacttcaaagaactgccagtgaaaagcagaaagccggaaaaattgcgcggtcatccgttttaaccgttttgccccaatgatccagaccggccggtacccggcgtttttcaggcctgccgtccggctctttaaagagtccgccgaaaggttcgcacattgaaattcaaaagccagcctttcttctccgctttctgccgtcaagtcaggccgctgtccagcggaagtcagatacggttccaggctgacactgcacccttgtgtcttcagccagagaaaaagctgtctttttccttccagatggtattcgctttcaggttcggattccccgggacacagcctgctttttttatgagcgaagtgcggcagtttttcgcgtcccagtttgatatcaagctcacttttgcaaacggggcagaaccagcgtttctttctcagctccgccgctttttcctttgaatagcttccggccagctgaatgagccgtccgccggcagtcactgcactgaacatgttgcatcttctcctttcctgaatcttgttgtattcagcaggaagaaggcataatcctgtttgcggatgagagccgttatacggttttcagccgttcatcctgtcattcagaacaaaaaaaaccgatttctgctgagagaaatcggttttttatgatgcaaagtgtttttttattgtatataacgcatgatcagcgatcactaatttgccgtattcttcaagacggtgaatgctgactgatgattcgtgcgcgtactccaacaggatgcttagctgattttcaacctcttcatcagtttgctcataaaaatctgcatataaataatatcggtcttcaaacgaatacagggtcgttttgattccgttaagattcaattttgatagcgagatgagatcctcaaaatcatcgaaccgcaaagtgaactgaagcttttgctccttatcttcccggctctcggcctgctcttctttctggaaatcatcaagtaaagcatcgagattttcatctgccggctcttgttttttatcttccgggatcggcagttcgagtttttgtccgtccttggaaagctgggcttttgttacgattatttccagtcctttgtccaatgcctgaacctgaatccaaagaggaccctcgacagcgaattcctcttcatcatgcacttcatccatgacttcccagaacagttcttcactgcgctcgcgattgtaccagatttcttctctgtcaaaaccgcgatcttcaatatcaccataagacatataaaattttacagtatgctcattaattctttctatttccattttgccaaccttcccttctttataagatgttgaagggacatctaagctcccgatgaatagtactttactacactttacccattccgtccacatcttaaccttatagaagacagcgcaaattctttatatttctattttatgataaaacagttataaaagaaataaaaaagcattttcacaccgaaaaacaggctttctcccggttcccatcataaatagcgcactgcttcatatattagctgtacaagcaatcgatctataagcgaggtgttaccatgccgcacgattacctgctgtcccttctgcttattatcgggattgaccttattctcggcggtgacaatgccgtcgtcatcgcgatggccagccggaatctggcccataaacaaagacagcaagcgatcatcttcggaacatttatcgcagtcgtcttgagaatcgttctgacgagcgctgcggtctatttattgaatgttccttttttacaatgcgcaggcggggtatttttattgtatctcggctatcagcttctgattgagaagaaagatgcgcagcatgtgaaaagcagttcttctctttggaaagccatccgcacaatcgttctggctgatatctttatgtcgcttgacaatgtcatcgcagtagccggcgcttctcacggtgagctgacactagtagtgatcggtctcttcatctcggtgccgattattatttggggcagcaagctcgttcatgccgccatggaaaaaatgcctttattgatgtatgccgggagcggtcttctcgcatttaccggcggtgaaatgattgccggagacagcaagctgtcatttttcatggcagaacacggcatgatacagatgatgctgccgattttgaccgttgtttttgttatcctcgccagtatgatttaccagcagactgaaaaataacaaaaagcccaaaccgcgatggttttgggctttttccatgcttatcgtaagcttatatcagttggcaagacgctgtgcttctcttaattggaaagaacgcacttttcttggcaggaatcgtctgatttcatcttcgttatagccgacttgcagacgtttttcatcaatgatgatcggacggcggagcagtcccggatgctcattgatcaaagtatataagtcttgaagcggcatagattcaacatttacgttcagtttctggaatactttagaacgggtagagataatttcatccgtaccgtcttcagtcatacgcagaatctgcttgatctcatcaattgataacggctcggagaaaatgtttctttctacaaacggaatctcgtgctcttcaagccaagctcttgcttttctgcatgacgtacagctaggtgatgtgtataatgtaaccattaatcttcactcctctaattagtaggatgaacatgtttgtattctcaaattgaaatgactttaaaaaaggaatctttataggtattatactataaaaaagtaagtgtgaacagtctcctgagaaaaaaatgtgtcaatccggcaaatttacggctggaggatttttccccattctcaattagctcagctgatcgaaaatgtttttttgttttttctcatcaatgactttgagaacttcatccgttttctcgtatgattctccgtaccatttttcatctttataagtgtgaatgttttcatatgtctgtttcatcgcttcaaatatttcttcttctgattccgtcttaggtgaccagtacagaatctccattttgttcacttcattcgtagccaatgaccggcgccgatacccgattgactgcgcgtgcttgaaatgctctctttgataaaaacgcaagcgtttctgtgtatccgtgtcatcctcgtcaacaggctccacctcaagcagaatcggcttgttcttctttttcagtctgccgatcagcttgcttccgaggccttgtcctctggatttctttgacacaaacaggtaatcaataaagatgaaagagtcaaattccgcatacatcagcacgtggtactgcccctcttctttatgataaacatcgctttgctcctttaacagagcttccatatgcgcttttgatttcatttcttcaatcggaaaatattcactcagcttttcgtaccagttcattcatttgctccttatgggttcgttgtcttcacacttttagatataccccatttccgattgtttaaacaatcttacatctattaagacgtgtgatcctttaacatggtttcaatttttttaaaatggtgtgtaatcgacgtttttggtataacggtttgccgcgtcccacaataaaaattcgtcaattccttcatcatgcagcgctttaacctggtcctccacctggcgtttcccgtacttttgataatttccgctgccgagatatgatgccgtgaagtcctgaagccacggacgcgatacaggcgggtgtttcagcttggacagctttttattttccaccttcgcgtattctttgacgacattgtagggctcaagatccggtttatcaatgccgaaatagcttgtccaatggctcggataaatcatggatgaaatgacatcgacctggtctgaaattttgctgaaattctggccgataccaggcgcttccggcagcgtggctgaatagccgaaaatatcaaccgacacatccgcgccgtacggcttgagttttttcttcgcataaccgacaaaatcggtgacggcgtgaacgcgtttttgcacattgctgtctgctgtttttccgtaatcgccgtgtccgtatgtcagttcgtcatcacgtttttcaaacccttcaggaaaacggacataatcaaactgaatttcttgaaaacccatctttacggcttgttttgcaatctttacattgtaatcccatacttctttcataaacggattgacgaacgattcgccgcggccgtttttccagacacttccgtttttttctttaaaggaccactcgggctttttattcgcgagttcgctgtctttaaatacgacaatacgcgcgatcggatagatctttttttcctccagctttttcatcatcttttttgggtctttgatgtacggcttggcgattttggcatactcagaatggccgtccggcttaaaggtgaggttcccgttgtcgtccttgacatcaatcaccattgtattgagctccgttttgtccacaaagtctgtcagctccccgaatttgcttcctcccgctgaatgtcctgtgacgtaaatgccccgcaccttatcaggatgtgaaaaatgcagccctgacggataagcgaaccgtgcatttgatttcggcaattctttttcagccagtgctacttttacaagcggctgctcctctttcacagcggcatgggccggataagcggctgcactgataaacagtcccgcacaaatggcgcacaaaatggttttcatactgatctccccctttttttccattatagaaaaacgggagcaggcttaataaacttgaatgtgcgcaaaaaaatcctccaagactcagtcttggaggatgatacgtttatagataggttttaaattcagcttctgtgcacatgacaaaatgtcccggtttcacttctctgaattccattttttctccttcttggagctgatgaactgccggatcgtatttctttcgcgtgcgatttctttcatagtccggatcaggaagcgggatagcggacagcaatgatttcgtatatgggtgaagcgggttttcgtaaagctcatccgccggcgcaagctccaccaattttccgaaatacatgacgccgatgcggtcgctgatgtatttgaccattgataaatcatgggcgataaacaggtaagtaagccctttttctttctgcaattctttcattaaattgacgacttgcgcctgaatggagacatcaagcgccgaaatcggttcgtccgcgatgataaactccggatcaaccgccagcgctctggcgattccgatacgctggcgctgtccgcctgaaaattcatgcgggtagcggttggcgtgctctttatttaaaccgaccgtttccagcagttcgtgaacccgctgcatccgctcttttttcgtttttgccaggcggtgaatatctattccctcggcaataatgtcggcgactgtcattctcggatttaaagatgcgtacggatcctggaaaatcatctgcattttccggttaaactccagcagcttcttgcgggattttttcccgtggacattttccccgttaaagagaacttccccgccggttgcctcatacagccggataatactgcggcccgtcgttgatttaccgcagcccgattctccgacaaggccgagcgtttcgcctttataaatatcaaatgacaaatcatctacggcttttaccgttcctttctgcgtgaaaaaatgctgttttaagtgtttgatttcgagaagtttctcagtcatttttttcaccttccttcattaaaacaggatgctgatacgtattcggaagctgacggattttagccttcaccgcttcaggcggctcgaccttaggcgcatcaggatgcagaagccacgatttcacaaaatgcgtatcagacactttatacatcggcggttcctgttcaaagtcaattttcatcgcatatgagctgcggagcgcaaatgcatcccctttcggaggattcgtcagatcaggcggcgtacccgggatggccgtcagtttttcctgatcggtgctgtccagactcggcattgaggcaagcagcccccacgtatacggatggcgcggatcataaaagatttcatccaccgtgcccgattcgacgacctgacccgcgtacatgacggcgacccggtcggcgacattggcgacaacgccgagatcatgcgtgataaaaatgatagacgtatcaattttcttttgcagatctttcatcagctcaaggatctgtgcctgaatcgtcacatcaagcgctgttgtcggttcatcggcaattaacagtttcggatttgccgcaagcgccatcgcgatgacgacacgctgtctcataccgcctgaaaattcatgggggaattggccgatccgtttttcgggcatcggaattccgacgagatcaagcagctctatggcgcgctttttcgccgcttcacttgagattttttcatgtttgaaaagcacttccgtaatttgcttgccgactctcatcgtcgggttcagagaggtcatcggatcttggaaaatcattccgatgtcctttcctctgatggcctgcatttctttttcggacatcggcacgatatcgcgtccgtcaaaaagaatctgtcctcttttaaagtagcccggcggcatcggaatcagcttcataatcgcttgggaggtcacactttttccggaacccgactcccccacgatcgccagcgtctctcctttattcaaatggaaattgacgccgcggattgcctgtacctctccgccgtatgttttaaatgaaatggctaagtcttttacttctagcaaacgtgtcactcatatcactccttatttgcgtaacttaggatccagcgcgtctcttaacccgtcgccgacaacgttaaagccgaacatcgccaggcagataaagccggcagggaagaacagacgccaagggtaataggttaatgcaggcaatccgtctgaggccatcgttccccagctcgcaagcggcgcaggtacgccgaggcccaaataacttaaaaacgcttctgtaaaaatcgccgtcggaaccgtcagtgtcatcgttacgagtatagagcccatcgcgttcgggacgatatgcttaaacaaaagccggccggttttggcaccgagtgtctgtgaagcaagcacatactcctgattctttaattgcagcacctgtccgcggacgatcctcgccatattgatccagcccgtgatcgtcatggcgacgataatggtgagcaatcctttcggcaggacaaccatcagcaaaataaccattaataatgaaggaacagcccacagaatgtcggcgatgcgcatcatcacttcatctgtgcgtccgccgcggaatccggaaatgctgccccagattacgccgatcaataaatcaagcacggcagctgcgacaccgataaagatggaaatccgcgcgcccacccatgtccggacgaatatatcccttccaaggtcatccgtgccgaaccaatgatctttcgacggcgctttatccgcatttaatagattggtagtggcataatcataccttgaaaagataggcgcaaaaatcgccatcagaataataagaacgatcagtacgaacccgaccatcgcaagcttattgctgcggaagcggagcatggcgtctttccagagggaaaggctttttttatttattttttcggcatcgccggcattagctgaagctggttcaaacatatttttaggaatgttctgcatggtctaggctcctttctttgctttggaaagcttgattctcggatcgattaatccgtacagcacgtctacaattaatacgcatagaagcaggagcacgctgaagaacacggtaactcccataatgaccgtataatcacggtttgtaatgctgtttacaaaatgcgcgcctaaaccgggaattccgaaaatggattcaatgatgaaacttcccgttaaaatggatgccgccatcggccccatatatgtcacgaccggcaaaagcgcgtttcgcagcgcatggcgcacggtgactgacggacgggacagtcctttagcttttgcagtccgtatgtaatcgctgtttaacacttcaatcatgcttgaacgggagagtctggcaatgaacgccatcggcatggaagcgagcgcaatggagggcagaaaggtgtatgcccaggattcccatcctgcgaccgggaacagttctaatttaattgagaaaatatattgcaaaatcgtcgccaatataaagctcggaactgagatcccaaagatcgttaaaatcgcaatggtataatcctgccatttattatggtacagggcagcaagcaccccgaaaagcacaccgaacgctaaagcgaggagaatagcttctgcaccgagagtgaatgagacggggaagcctgaattgattaaatcattaacactttggcctttatatttaaaagaaggcccgaagtcccacatcgccacagattttaagtagctgacatattgaacgaaaagaggcttgtccaaaccatagtgttcgtttaagtttgcctcaatttcaggcggcagctttctttcgccggaaaatggtccgcccggcgctgcctgcattaagaagaacgtggcggtcacaatcacaaacaatgtgatgatcatgtaaatgaatcgtttaccgatatatttcagcaaggtgaacacctccatgttttttacaattttatacgtaatcagtaagaaaggtatatggggacatcctccccatataccttgggtcttttgttttcagaaccggcttttattcaaaagaagcgtttctgaagtaaacttcgcctgttcctgtcaagatcacatttttgaggtttttatcctgcacccaaggatccgtatagaaataaactggcgcgaccggcattgcgtcgataaagatcttttctgcttttttcagctcttcgatacgtttatccggatccgtttcaagctgagattggttcagcagctttttaaactcaggatcttcccacccggtatcattgtttccgccttctttatcacggaacaattcaaggaagttgatcggatcgttgaaatcgccgagccagcccatacgtccgatttggtagttttggctgtgcagcttgtcgatgtaaacattccattcggagttatcaagttcaactttgacgcccaagttctttttccacatttcctgtacggcctgcgcgattttcgcatgcgcgtcatccgtattgtaggacagcttgatcgccggaaggtcagaggcactcttgacgcctaattccttcagtcctttatttaagaattctttagctgatttgacgtcattgtctttgaagtaaccttttgtgttatccttgaatcccttcattgacggcggcaccgcagccatggccgggatttgttcgccctgcgttacatttttcacgatggacgagcggtcgatcgcataagcaagggctttacggatgttaacattgttcagcggtttcgcttctgtgttgaatttgtaccaatacacgcctgcgatcggttcaacgtgaagagatccgtcttttttcaatgtcggcagagattcagtcggaagctggccgagcggcattcctgcccagtcaagctcaccggcctggaattttttcagttcggtgttgttattgttaatcatcaccatgttgattttcttcaatttcacagcgtctttatcccaatattgatcgttcttttcgagcgtgatggaaccgctgtgtttccaggccgtcattttgaacgggccgtttgacacataattttcgcccgcgtttgtgttccagtttttatgtttttcggcgattttcttgttgatcggcatatacgtatagaatgaagttaattgcgtgaaataaggtgtcgggttattcagttcaacctttaatgttttgtcatttacggcttttacgcctacatcatcaatcttgccttttcctgtattggcagcttcagcgcctttgatgtagtagagctgataagcgtattgtgattcgttgttcgggtcaagcacccatttccatgcatattcaaaatcctgcgccgtcacagggtcgccgttagaccatttcgcaccgtcacgaatcgtaaatgtataggtctttccgtctttgcttgtttcaattttagatgccattccttcttcagggtcacctttggagtttacgcgtgtcaatccttcaaaagtctgtcggattacgcctcctgaaacggaatcattcgctaaacccggatgcaatgagaacggctcggttttaatattgatattaagtgaagtctgtcctttggtgtcttttttgccgccgcctgatccgccgctgaatccgccgcacgcacttaatacaagcgagaagataagcatcaaacctacaatagaccaacgctttttcatgcactaaccccctaatcaaatttttcagcctttactactaaatactcagaaatatcagacaaaataacttaatatttttctaaactttaattgtgttccgtcttttctgattattttatgtaaagaagctgtaacaatagagtgaacaagttcattataatgaaatgaataatttattgcaatactattttctcaatttaaaatatttaaatttggtcagtttttctgtcaaaaaggtgatacacttctatagtttaaagcatgacctaactaaatttttttaatgtaatttccagttcatattgctttttacatataatattcgttatacgaaatgttgatatacgttatcatttaagctttttcagttctttttgaggatttccacccctaaagtaaactggaaataagcttgtattcctctgatgacatttggctataattgatttataatagatcaatcaaatacatttgttgtgattgcgatgatgaagagtagtacacattttcatccgtttgaagagagtctgcggtgctgggagcaggtaacgggcgatgtggaatggacttctgagcagctgaccgaacgttagtaggcccagccggagcagcctccgttaccaacgtctcgagcgattccattgtaatggaataatcagggtggcaccacggttcattcgtcccttttttctacgggaagaatgggctttttttattatgttttaagaaatgaggtaagaactatgaagaaaacgattttttcaggcattcagccgagcggttccgttaccctcggcaactacatcggcgcaatgaagcaatttgttgatttgcagcatgactacaacggctacttctgtattgtcgatcagcatgcgattacagttccgcaggatcggcttgagctgcggaagaacatccgcaatctcgcggctctttatctggccgtcggacttgatcccgagaaagcgaccctctttatccagtcggaagttcccgctcatgcccaggcggggtggatgctccaatgcgtcgcatatatcggcgagcttgagcggatgactcaatttaaggataagtcaaagggcaaagaagccgtcgtgtccggactgttaacctatccgccgctgatggccggcgatattttactgtacggaacggatcttgttccggtcggagaagaccaaaaacagcatcttgaactgacccgcaacctggcggaacgctttaataaaaaatacaatgacatcttcacgattcctgaggtgaaaattcctgaatcaggcgcgcgcatcatgtcactggctgatccgctcaaaaaaatgagcaaatcagatccgaaccaaaaggcattcatcacgctgcttgatgagccgaagcagctcgagaagaaaatcaagagtgccgtgactgattctgaaggcattgtaaagtatgataaagaaaacaaaccgggcgtttctaatcttttgacgatttattctattttaggaaacacatcaattgaagaattagaagctaaatatgaaggcaaagggtacggtgaattcaaaagcgatttagccgaagtcgttatcggcgcattgacaccgatccaagagcgctatcgtgaattaattgagagcgacgagcttgaccgcattctcgacgaaggggcggcgcgcgcaaacaaaacggccggcaaaatggtgaagaaaatggaaaacgccatgggtctcggacggaaaagaagataaaaaaaagaggcgggagaatccccgcctctttttttagttcacttttgattcctgttccatttcccaaagcttttcgaaaaacggctgccctttaatcaaattttcacagaacgcaagatgtttatccgaccagccttcaattgtttcattgtaaagcatgtcccagatctcttcaaaactcatccgtttgatctgctcatacatatgcggattccattccgtgtaccaatacacaatttccgcacggtttttcagccctttcagctggtcgagcgccataaacatcagctgcttgatctgccgctcttttctcgtcagacctctgacatgccccggcgccaatgacaaaatgtgatattcctttgaagactccaattgcgacggctcaaattgaaacgattccggttctacatcctttaccatttcataaacaagctgctcctgtctcggaatcaggcggctctttctgaccggaatggtatacccgatcgtatccacggcaatgatgccgatcccgtctgtcacgacaaaacagtactccagctttgtccgctcatgattttttcgcacgtatgacttctggtggacttggtcaagcagctctttcggaagctctgataagtcgttttctatgtaatgaaataatactgacggcactctgagcagcggcgtctgatccaaaagctcaaccgtgtcttccttccgccattcgtgaaaatggcatacattgtagccgttttcttccccttcaaaccaattgacccatacatcatgaagaaataacatattcgacccctcactttataaaaactgttgtccacagtataggcaagggatagataaattattccatttcaatatgagatttccgttttacggagctggatttccgactgcattgcaacaaaaaaatctcccgttcgtccgggagatcatttcacatttttcggatcaagcgcatcacgcagcccgtctccgacaaagttgaagcacaatacggtaagaaggatcaacaaacccgggaataacgggtaccaccaagcctgtatcataagcgtaaagttctgtgcatcctgaagcatattgccccagcttgcgatcggcggctgaatcccgaaaccgagataacttaatgtagattccgccaaaataaccgttcccacctttaatgtggctgagacgataatcggtccgagcgcattcggcagtatatgagaaaagatgatgtgatggttttttgtaccgatcgtctttgcagctaatacaaactctctggaacgaagcgataaaaactctcctcggacaaggcgtgccgttgttgtccagcctgtaagggagaaaattaaaattaatttatccattccgggctgaaaaatcgtaacaagtgtaattaacaaaaatatatcaggtatggataatacgatatcaacggttctcatgagaacggcatcgacaaaccctttaaaatatccggcaacggctccgacaactgtcccgattgtaatcgcgccgatcacagaagcgaatccgacaagcaaggagacgcgcgccccgtacagaaccctcgtaaagatgtctcttccgaatttatcagttcccattagatgttttaagctcggcggcttcaaacgattgatgagagattgactctccggagagtaaggagcgattaccgaagcgaataaagctgacaagataatgatggttaatataacggctccgattacagctagtttattttgaaagaacttttcgaaaaaaatcttcgtcattgtttccggtttggattgaatattttcctttaatttcacttcgctggggggtgtgccggtatttggctgtaacatttgacctctcacctctctttgttaatattcaatgcggggatcaaccagcgcatataagatgtccgcaattaaattccccactacaaccaaaacagctgaaatgaccgtcatggccatgataaccggataatcccgcgaaaaggctgaatcaataaacaatttgccgagacccggccaagtaaaaatctgttctaccactaccgctcccccgataaatgacggtatcatcaaaccaaaaatagtgatgacaggaagaagcccgtttctcaaaccgtgtttaaaaatcactttattatctcggaatcctttcgcacgcgccgttcgtatataatcctgttttaacacatcaagcatactggatcttgtgtatctcgttatccctgccatgtctgccgtggcgagcacaaaagcaggcagaatcaagtgatgcaatcggtcaaatatgttaaagtcagcattcaaagtgcttactccgccagtgggaaaccaccccagatttacagataaaaccatgattaaaatcaaaccgaaccaaaaattcggaatggcaagccctaaaaatgaagtaacagttatcccgtaatccaattttgaataaggacgtttcgctgacagaacaccaaatggaatagaaatcagaagagcgacaagggttgagaaaagcataagcacaatcgtattcggtaagcgggataagataagttcagaaaccggagtgcctttcttgacgatagaagtcccaaaatccccttgcagcatattccccagccatttcacatattgaacaggttccggatcattcaacccgtatttttcaatgaatttcgccctgtccgcttgactgattgtagggtccatcataagtgacatcgggtctcccggcgctgctttcatgatggcaaacgacaaaattgtaatgcctaagagaatcggcaaggacattaatgttcgccgtaaaatatatgtaaccatattcttgtcccctttttaaataggataagagaggaaaggaacctccttccctctccagggcttttgctatttttgatccagccaccatttttcaatattgtacaagtcatttttagggtggaatacatagccttgtaaattattcggcatcgctctgtggtaattgtaatagaataagaagctgtacggctgatcttcagcaattaatttgtatatctcttcatacttcttttggtattcttttctgtctgtaattgacttcgcttcttcaagcagcttatcgactttcgggtttttataccagatattattcagcccgtttttcgattggcttgaatggaagatagagaattgatccgggaacgttgcaagactccatccgagaagaagagcgtcataatcccaattaggggcacttgtctgttcgattaacgcactgaattcaacaattcgcggtttagcctcgattcccacttcttttaattgctgctgaacgacaacagctaaatcttcacgaattttattgccttgattcgttttaatttcaaatgagaatttttttccgtctttatcaaggtagccgtcaccgtcatggtcttcccatccggcttcttttagcagctgctttgcttttttcggattataatcaaatgtcggcactttagacttcggataattccatgacagcggactctcaggaacatccgctaccttaccgtctccgttcagcacttgatccaccattgcctgcctgtcaagagcgtaagtcaatgcctgacgcacttttttgtccttaaaaagctcttttttctcattccagccgatatagctgtagtttaagccgagatcagatttgaccttcacgtttccaaacgttttaaccgtatcaaaatctgtgcccggcacaacgaagaaatcaatatctcccgcttttaactgggccacggccgcgttagaatcaggaattgttttgactgtcactgtatcaaggtaaggtctgccgccaaagtaatcatcatttgcttccagtttgacatactcaccttttttccactcaacaaacttaaacggaccggagccgattggatttttacggttaaattcattctctcccagatctgcaaccggcaccttacccaatatatgttttggcaaaatgccgtaactgtcgagaacgacattatagaaataggcatcttttttcttcattttaaactgaatttcatattttccttttttcgttacggatttaagggactcaaaacccgagccacgctcaccgttgtaatccttgttaagagggatgctgtaggtgaaaacaacatcatcggccgtcagctcttttccatcatggaatttaacgccttttttcagttttacatcatacgttaatcccccgtcagcttctgttactttttcagccagcgacggcttgacgtttaatttctcatccgtttccaataatgtgctgtaaatcatgccttcaatatcagaacttgcaacatcggtagaataaagtggattaaaaagtgtgggttccccggttgacccgacaaccaaatctccgcctttttgcggttttcctgccggtttggattcggtgcttgtggattttgagccggagcaggctgacaggaagatggcgagcgccataaaaacacttagcatcatcagtgcgcttttacgtaatttcatatcaattccccctttgtgatatatatgcagcaaactggttatgtaatccggcataccccctctcgatgcttgtcatttcaggcatataaatggcaggcgacgtaatggccgggagcggcttcttcaaatgccgggatttgttccttgcagatcggtttggccatcgggcaccgcgtgtggaacacgcagcctttcggcgggtttgccgggcttggcagttctcctttcaggatgattcgttcccgcttgacggcgtctttttttctcgtgacgggcactgaagacaaaagcgcttgcgtataagggtgaagcggattgccgtacagctcgtgtttatcggtcagctccatcatttttcccagatacatgacgccgactctgtcgctgatatggcggacaacactcaaatcatgagaaataaacaaataggtcaggttgaattcatcctgcagttcttccatcagattgatgacttgggcctgaatggagacatcgagtgcggaaacgggttcatccgcaataatcagctcgggattcaacgtcagagcccgcgcaatcccgatccgctggcgctgccccccggaaaattcgtgcggatagcggtttgcaaagctcgggtgaaggccgactttcgccagcagctcctccactcgctcgttccgctcgctcatgctgtacatatggtgagtctggaacggctctttaataatggaacgcagcgttttcctcgggttaagggatgcgaagggatcttggaataccatctggatgtttttgcggacgctttttctcagcttttcttcagataagccggagatatcttgccccttaaagagaatccggccgtctgtcggcttgtataaacggatcatcgtccttcccgccgttgatttgccgcatcctgattcaccgacgatgccgagcgtctccccgcgcttcagtgaaaaagaaacgccgtcaacagcctttatatcaccgactttcctttgaaaaaaaccggagcggatcgggaaatatttttttacgtctttcagctctaaaatcgtttcttggcctgcagctgtcattttgattgggcaccctcttcctcatataaaaaacatcttacagaacggccgctttcatgcgttatcagctccggctgccctgttttgcatttgtccatcgcttttgaacacctcggggcgaatcggcagccttccggaagattatccggtgtcgggacactgcctttgatcgcttttaatgtatcaatctctccatctatcaccggtatggagtttaacagcccttcggtatacggatgaagagggtttaaaaataagtcctccacacccgcactctctacgacttgtccgcaatacataacgatcaccctgtcggcggcttcggaaaccacacctaaatcgtgagtgatcagcagaatagaagtatcgaattttttgcagaggtctttcatcagctccaatacttgggcttgtatcgtcacatcaagcgccgtcgtcggctcatcagcgatcagaagcttcggattgcagctgagcgcaatggcgatcatcaccctctgtctcatccctccggaaagacggtgcggatattctttcatcacttgttccgctctggagaatccgacgagttccagaagctcaacggcttttttagccgcttcttttttattcatttttttatggtattcaagcacttcggtaatttgttcgccgatggtcagcaccggattcagggaagtcatgggctcctgaaagatcatagagacgtcatttccgcggattttgcaatattcgttttcggtgaaggaggccaggtccctgccttccagcttaatcgagccgtccataatttttccgcccgagctttggacaagtcccataatagaaagcgaggtgatgcttttgcccgagccggattctcctacaagagcgacggtttcgcctttgttaatgtgaaaatcaaccccgtcgactgcagggatcggctgtttctttctgaaaaaataggtctttaaattattcacttctaatagtgtgctcatgatacgcccctttctcattccgctgaagcagagggaaacatacgtttcgctatcacaaaatatagaatagtcgaaaaattttatagttgtatattattacatcattattacaaaagcaagaattttttaggataaatgtaatatccttaaataatttccattcttttaatctattaaagcgttgcttccagaaaggtttttgaagggatggccaatgcttcttttactgttttttgatggtcggttaaatatttttttactatattgaatccgacggcatagccaagcattgaggggaagtatccttttccgtataacagctgggaaaacattctgctgtctctcgttaagcggaggttcggcttgactcttttttcaaacaaaaaatcaagctgctcaggcgtatagtaggacgtccattccgccgtaagacttgagccgaaccgctcatatacagcatattctgccagcccctccatcatgattgtatcaagaaatgtctcatctttttcgtcctttgtcacatgttctaaccggcagacgtgattatattcatgtgtcataagggcggatacagctgaattggaactatccgacgatagaaagaggaacattttgtcccgaaaggccagaccggattttgatccgaattcctgacggattttccggtttcgttcatcaacgggcaaaactacgatcggcacgtccggcccgttccacttctcctttaaataggcttcctctttttgtatatggctgtagcatcctttttctttcagccgtttactggtcctaacgccgtccttcagatggcggaacatgccgtggttttgcagcatcccgagtatcggcttccactctttcttatcggcccctgaaaaaagcggcaaaagatgcggggccaggtcatttacggatgccgccttttccatccattgatatgtctgcttgacgctcataccggttcgcctcctcttgttgttatcatatgcacgcacaaaaaaaccggccacctttttcaggcagccggtcaaaaactgtattattgatattttttaaagatcaaagtggcattatgtccgccgaagccgagcgagttgctgagaacgatgttgacatcctgctcgcgcgctttatccggtacataatctaaatcacactcttcatcaggtgtttcgatgttaatcgtcggcgggataatgccgtctttaattgccatgacggagaagattgcttcaattcctccggcagcgcctaacaaatgacccgtcattgattttgtcgaactgacggcaagcttgtacgcatgatcaccgaaaacggtcttaatggcttttgtctcgtatttatcattgtagtacgtgcttgtgccgtgagcgttgatgtaatcaatttcttcaggcttgatgcccgcatctttgattgcttcctgcatcgctctcgcaccgccttccccgtcttgggcaggcgcggtaatgtggtaggcgtcacccgttgagccgtagccgacaatttccccgtagattttcgcaccgcgggcaagggcatgctcaagctcttcaagcacgacgatccccgcgccttctcccatgacaaagccgtcacggtttttatcaaacgggcggcttgccgttttcggatcaggatttgtagaaagggctttgtttgcgctgaagcccgcaaatgacattcttgtcagcggcgcttccgttccgcccgtaatcatcgcatcggcatcgccgcgctgaatgactttaaacgcgtcaccgatagagttcgttcccgtcgcacatgccgtcaccgtacaggagttgactccttttgctccgagagcgattgagatttggcctgtcgccatatccggaatcatcatcggaacaaagaacgggctgacccttctcggcccttttgtcaggaagatttcgaattgggattcaagcgtttcaagaccgccgattccggacccgacccaaacgccgactctcggagcgatctcgtctgtgatgttcagaccggcatcttgaacggccattttcgcggctacgacagcgtattgcgtgaagcggtccatttttcgcgcttcttttttatccatgtgattttcaatattgaaatctttcaattcagcagctactttcgccggatactcgtccgattccacacgtgtgatcggtccgattccggatacgccgccgattgcatttttccagcttgtttcggcgtcgttgccaagcggagacaaggctccaagccctgtaacgactactctttttttactcatcttgtgtgcacctcacctttttttatcgtccccagcgtaatgctatggcgccccatgtcaatcctccgccgaaaccgaccatgacgatgacgtcgccgtctttaattttgcctgcttccagttcctctactaatgaaatcggaatggatgctgcggatgtgtttccatatttatggactgttttagacatcttttcaaccggaagctccaaacgttcccgtgccgcttccatgatgcggatgtttgcctgatgcggaatcaaaaagtctacgtcctctttggagaggccggctttttcaataacatttacactcgattcacccatttgccggacggcgaatttgaatacttctcttccatgcatgattgtatgccctttttcatctaagtacaagtgctgaccgcctgtaccgtctgctccgagctcaaatgaaagtatgcctctgtcgtcgctgaccggtccgatgaccgccgctccggctccgtctccgaacagcacagccgtattacggtcgtcccagtcggtaatgcttgagagcttttccacgccgaccacgaggacatgtttgtatgtttgcgattcaatgaattgtttggcggttacaataccgtacataaaacccgcacatgcggcgctgatatccatcgcgcacgcttttttggccccgagcttctcttgtatcatacaggaaacggtcgggaaagactggtcaggagtaaccgtcgccacaaggatcatatcaagctcctcagcggaaatgccggcctgatcaagcgctttttgcgcagcctcagcggccatgccggatgaatacatatcttcagcggcgattcttctttcttctatacctgttctcgtacgaatccactcgtccgatgtatctaccatttgttcaagatcatgatttgtcagcactttttccgggatgtaacggccgacgccaagaattccagctttcattggaaaagactccttttttataatgaatttaaaactaattagttatgatcaattattagtatcaggtactaattctaccctattttttttctgttggcaatatattcgtctaaactatcggacgctgctcctcatagaataaaaggaagacgaaaggaggcttcactatggatattttctccaaaatgatgttcggcgattccagagaccgggataaagaaccggaagaaaacccggagcagcctcaggctgaaaacgaagaagagatcgattacaaccacgtgttgaatcagctggggtccatcatgaactccctggatcaattaaagcccgtatttaaagactttgcgccgatggtgtccgccataaagaaaaaaatcatgtgaaaagccacttcatgaaaaagtggctctctttatttattcagctccccggcatcagatctgccaagctcatacgcttccgccatgaccgatgtaaacaggtccataaacggctgaatcatttccatagacagatctatgccggatttctcaagctccgcctttgcttccggcaagtatttcatcgcgatctgcataaattcaagagacttttcatgctgcatgtgtatccacctctattcatttgacggcagttcatttgtttgattatacgttttgacaaggtctgagattttgtcttgaaacgctttgtccaccagcgggctgaacgtccccatttcaacgactccttccctgaaatcaaagtcgtgatctccgctcttgagcgtacctttattatattgctcggcaattaatgtataggctttatctacgttttgcaccgtgcttgtcagcaccgtgtttttgccgagattcgattgctcggcgacatagccgatggcgtaaagcccgtcttttttgatttgctgaatgacaggaacattatacccgtctccggccggatatacaacatccgtgccctccgcttttaacttctcgtaaagatgcagcgcttcattgccgttatcccagtggtccgtaaattcagtattgacggtgatatcaggcttttcatatttcgcccctttgataaagccgtctacttcaggctgccacaaaaaggaggcgatgacaccgacctcattggtttttgacatatgggcggccgtcattcccccgaaaaaacccattgcttctcccataaggtgaacgcttgtgacattatcgcttttcgccgttccgtttgcgacgacgaattccatgtcgggataatccttgctgatcatattgaagatttcctcgtattcatttccgtgcccgtataaaagattgactccttttttatgaaaatcatctatcgcttttaaaatatcttcatcggatctgatattttctttataataaacgtcaacgttaaattcagattgtatcgctaataaacctttgtaaccttttgtgccccataccaagtcactgatggtatcggggaaaagcattccgaccttctcaatttttcctttaaacggagtttgtgtgcatccgctcaataaaaggaggacagaaaagatcatgacaagcctggtgatcaagccatgttcaaccccttttcaaactcataacatgtataattgatatacgtttattgtagcggtaatgcacataacatggaaggtatttcttaaaaaatgtcgaatattgatgaaaattgtcttttccattctttaattttttcttccgcttccgttttttgcgttttttcttttatttccagggtaataatctgattttcgtcttctgtgccgtcagcctcaagcttattcatcagcccccagaccgcgtcttctaaaaagatcctgctttctccatcttcttttgcttccgtccacggaccgtaaaggggaggaaggataatcgcttttgccgtatcccgctgaccgtttttttcccagtctccgtgatcctcactgtaaacaatccaatataaaggctcagcccttttttcaggcagacacccgctcccgtattgaacgcagatacgatcgtattccttttcaccgatttcctctattatttgaaaaagcccgtttctcgcgagccacattaaacgttcttctaaatacagctgcctcgttttgtcctccggttctgccaaaatgacatcaacgtgcacaccttcatccatcaaccgttcgcacaatgaaaggccgagaaattcatctgctccaatgatcagcgctgttttcatcacatctgccgcctttccggtttttcatacacacacaagccaaacagccctctgaaaagagatggctgttgtattctattcattacaggtctttttcatgactgcggaaaaaccggcagatggctctgtacatacgagcagggttctcaagcaggtgatacgtgatatcaatcttgcttccggtcttttcccgggcttctttatacgcgttcgcgtgcagggtgtacgggtacggcgctccggtcgttctttgccatatatgtaccggcacgcgggtgcggcagccggtaatggtctgatagctcagtgagcttgcctctttttcagaaacaccgaagctttgtgccgtttccctcagaaactgcttataaaaaaacttattttctttctctgattcaaaatgggcttgaaggtccagacaaggatctaacattgcggctgaacggatatgctccggtgaagactgcagcaattgatcggcgatgagggcgcccatgccttctgcgagcaagtgtattttcggattgagggtttcttgtttcagcacataatgaatcagctgtctggcgtaaagggcggctttttccgaaccccaatgccgtccgtataaattgctgttgaaaatggtgtaccctctgtcaagcagcgtatttaacagctggtttctcccttcatgttcgagccaaaagcttgagtcccggctgacaaagtgagttctgtcccccagaataaagatacagaagccgttcggccgatacggcagatggatgacgttcagctcagatccgaattggaaaaatctttccgttatccccatgcctgcccgcctccttttactcctaatctctctattggctatcatatgtaagaagaatgaaaacggatcggataaactcctatttgctgctatgttttggctattatcccaagcacaggaaccgaattttccgtcagacggcaagacaggcgggcacatgtcagtttcaggcgcgctttttgatgagaaaatgaccttccgcccgcgctttatgtatggtatgatacaacgtagaataaaatgaaggacgaggtggaaacgtgcggtttattatcggttttatttggacgttccttttaacacatatggcctgttatttggtcgcctccatgaacagcgcggcgtacaatttcaagcaatcatccgttattgccgtggttattgcggtgctagtctttgttcttgcggagatcatgcctgtcaaacaggatgcaaaccagcattaaataaaaaacctgctattcagcaggtttttttgtgttcacggttttcgttggtacgtccacaatctgttgtggtttgaagtttcagggaacatttctcccaccgtaagtttgattttttgcggatttttgaccatgcttcccgtttcgccgatttcaacgtacacaccgttattcggcgctttttgtcccgggcggaattgatgctgctgtcccacgtcatttcctcctttttcttttttatgtagtatgcgcttgtatgcggagaaatatcaaaaaccgctgaatgagattcagcggtttttttgttcatcctgtttgtatagaagagctttcaggagcgctttttgcgcgtgaagccggttttccgcctgctggaataccgcagagttcgtgccgtcgataatctcggacgtgacctcttcttcccgatgcgccggcaggcaatgcaaaaatgtatagtcgggtttggcgagactgacgagtgaggcgttgacttgatacggagcaaacacattcagccgctgctgcgtctcttcctcctgccccatgctcgtgaagacgtcggagtaaatcacgtctgcatcccgcaccgcttcctgcggattttcggtaagggtgattttcgctccggaaacagccgctgcttctttcgcggcattcaccgcctcttcctctgcttcatagcctttcggcgaagcaaccgcaatgtcacagcccatttttgcgcagccgatcataagtgaatgcgcgacattatttccgtcaccgatataggcgacttttactccttttaattttccttttatttcttgtattgttaacagatccgcgagtgcctgacacgggtgataccggtcggtcagcccgtttatgacgggaatatcagcatgctcggcaagctcttcgactttttcatgctcaaaggtgcggatcataatggcatcaacgaagccggacagcaccttggccgtatccgcgaccgtctccccccgcccaagctgcaggtcgctgcttgaaagaaatagtcccgttcccccgagctgggccattcccgcttcaaaagacacacgtgtgcgggttgaagatttttcaaaaatcatcgccaatgttttcccttggaaaatcggctgtatcggatgttgttttaataatgaagcttctgtcagaagcgcattgatgtctgacgggctgacatcttttaatgaaagaaaatctttgccgtacaaatgggttaatgtgtgttccgcttttattgtgtgcatgatgccacttccttttgataaagatctttgagcgatacaggctgaggtttgccggagccgcttgctaaaaatgcctttacggtttccggttcagtaaagaccgtcacaccgtgcgtcatggcttcgatccgttgtttacgcgcttcttcagagtgattgaaattaatatggaccgctttatcctttcgctctgcccatgccgggaacgcatctttgcatacggtaaatcccgcctcttgagcctgacgttccaattccgcatcacagccttccagatagatgctgccttttttctcccagacgtgcgcgtagatttttttcagtgcgctttctgcgtcaaacgcgacacacatgccttctccggtcgacttcatttccggcccgggctttacgtccacatcctgaatggcgtgagaagaaaaaaccgggaatttcactgccgttccgtgctgattttgaacctcgggcttgatgtctttaagggaagcgccggccagcaatctggcggcaagcgggatcatcggcacccccatcaccttagacacgacaggaaccgtgcggcttgcccggggattcacttcaagaacgagaatatcccctttgtcatcaatgacaaactgaatgttcataatgcctttaaaagccagttttaccgcgattttttcggcggcctcttttatattccgctgcatatcaggtgtgacagacggacccggaagaatcgcaaaactgtcgcccgaatggacgccggcccgttcaatgtgctctgtgtaagtcggcacgaatacttcatgtccgtcggaaatcagatcgatctccaattcttttcctgtaatgtactgatcgatcaaaatcgggtacggcatgcccgcttctttttccaggagctctgacatttgcgcttctgaatgaacgatgatcatgcccatccccccgatgacataagacggacggatcagcacggggtagccgattcggcttgctttttcagttgcttcttcttttgaataagccgtttcgcctttggcatgtttgaggtcaagatcatcaagcagctgataaaacagatcccgatcctccagcgcatcaagggtttcaaaggatgttccgagcagcggaatgcccgctttttccagcggttcagcggcattgatcgcggtctgtcccccaaactggacgatggcaaaatcaatgttttcatgttccgccacgtttaaaatatgttctgtcgtcagcggttcaaaataaagccggtcggcgatttcataatccgtgcttactgtttccggattgttattgatcataatcgtttcatatcccagcttttgcagggtcagaacgccgtggacggcgctgtaatcaaattccactccctgaccgatgcggatcgggcctgagccgatgatgagagcgcgttttttctcttttcggctgacatctccgtcgctttccccaaggtaggtggagtagaaataattcgtcttggcatcaaattcagcggcgcatgtatctacgattttaaacgacgggacgatgcctgatttctttctgagagcacggatgtcttcttccgtttttcccgtgagagatgcgatcatgacatccgtgaagccttttaccttcgcctgctttaaaagcgggacagacagatgatccccttcttccatcagcttgttttctaatgtgatgatatttcggaatacatggagaaaaaacgggtcaattttcgttttggcatggatatcttctatcgtttcaccgcggcttaacagttccatgacgacgaaaaatctccggtcatccggcgttaccgctaattcccacagctgattgatcgtacagccgccgagttcaggcaggcgggtgccgatcgttttcagctcaagggaggccgccgctttttgaatggccgcttccatatttctttcgatcgccatgacctctcccgtcgctttcatcttcgttccgagcgtgcggtcggcatgtttaaatttatcaaacggccagcgcgggaatttgacgatgacataatcaagcgccggttcaaagcttgcataagtagagcccgtcagcggatttttcagttcgtcgagcgtatagccgacggcaagtttcgccgccattttggcaatcgggtagccggtcgcttttgacgcgagggccgatgaacggctgacacgcgggttcacttcaatgacatagtactgtttgctgaacggatccagcgcaaattgaatgttgcagccgccgaccacatccagcgccgaaataatcgccaggcttgcggaacgcagcatctgatattcttcatccgttaacgtctgggacggtgcgacgacgatagagtctcctgtatgcacgccgacgggatcgatgttttccatattgcagacggtgatgcatgtatgattgctgtcgcgcatgacctcatattcgatttctttaaatccggcgatgcttttttcgacgaggcattggctgatcgggcttgctaacagcgcctgtttaataagcgtctgaaacgattctttcgttttcgcgattccgcctccctttccgcctaatgtgtacgccggtctcagaataaccggaaatccgatagactcagcgaagcggagggcgtcttcttcgttgtcgacgatttcgctttccggaacgggctggtcgagctctttcatcagggcgcggaactgctcccggtcttcgcctttttgaatggtttccaccgatgttcctaagagcttgacgtgatgcttcttcagcacgcctgcttcttcaagtttaacggctaaattcaatgccgtctggccgcccaaattggcaagcagaccgtcgggcttttctttttcaataatggcctcgatgctgtcggttgtgagcggttcaaaatatatttcatcggcaaacgcctcatccgtcataatcgttgccgggttgttattgactagaataacgcggtatccttcttctttcagagccatgcagccctgcgttcctgaataatcaaattcagccgcctggccgatgatgatggggccggagccgatgactaatatgctggaaatggttgtatctttaggcatgagcgatttctctccttgctggtatcactttctctagaaattcatcaaatatccactcgctctcagccggaccgggatgagcttcagggtggaactggacgcttaatacgggaaggcgcttatgaatgagcccttccactgatgtatcattgacatggtgaaatctgatggacagctcgttttcgtcaattgacgcttcatcgacgacatagctgtggttctggcttgtcataaacacccttttcgttttccggtcaatgacgggatggttggcacccctgtggccgaacggcagcttatacgtatttcctccgaaagccagggcaatcagctgatgcccgaggcaaatgccgagtgcagggaaatcactgagtaaagatgtaatccggttcatgtacggcgcaatcgctttcgggtcgcccgggccgtttgagagcacgattccgtcaggctgaatgtcataaacggcatccatctgctgatacggaatgaccgttactttacagccgcgctttacaagtgacgaggcgattgattttttataaccgaaatcaatcagcgcaatatgccggtctccgttccccattgaagtgatgtcttcagactgcgccagctccgccggattttgtgttccggatgctgcgggaatttctcctgctgttgacacagcagcgttcatcgtgccgccggagcggatggctttgacgacggcccgtgtgtccacttcggttaagagcgggatgttccatttatttaaatactctctcaagcttgagactgcttcatggtgagaaaaatgttcacacgcttcatagacggcaacagccttgacttgtggaattttactttcaaggtctttttcattaattccgtagtttccgatcagcggatacgtaaagacgatgatctgccccttatatgacgggtctgtaagcacttcctgatagcccgtcattccggtgaaaaaaacagcttcgccaacacagcaagcctctttttcaagttcaccgccgaatgatgttccgtcttccaatactaaatagcctttcatctaaagcccacctcttgatgaataattaattaaaaatatgaatttttatacctttatatcgaaaaaaattaccgtttcactgccgaatgcgcttcgatcgctgctttcagcatactgacggccgacagcatttcttcttcagaaaccgtaagcggcggaagcagcctgatgacattcggtccggccggaagcacgagaagcccgcgttcctgcagatctccgatgatgccggacacgggacctgcgcattcaatgccgattaataacccttttccgcggatttcttttacaaaaggccctgtcagttcacggttcagctgcgcttttaaaaaagagcctttgtctgccgccgcctggagaaagtccggctgaaacacaatgtccaaagttgctttcacagctgccatggcgagcttattaccgccgaaagtcgtaccatgcgtacccggcgtaaaggcgtcggcaagcttctttttgccgatcacggctccgacgggaaaaccgtttccaagccctttcgcagcagtgatgatgtccggagagatgccgaagtgctcatagccgaatgccttgcccgtccggccgattccggtttgaatctcgtctgcgataagcagcgcctgtttgtctttgcaaaatgtctgtaaggcttcgatgaattccggatcggcgggattgactcccccttctccctgcaccgtctcaagcatgacggcggcgatatcatcctcttttgaaagtgtgctgaatgccgacgggtcattaaacggaagatagtgaaagccttggagcatcggtccgaaaccggtcttgattttgtcttgtccggtggcggccatccccgcataggtccgtccgtgaaaggattgatgaaatgttacgatttttgtctttcccgttgctttacgggcaagcttaatggcgccttcattcgcttcggctccgctgttgcagaagaaaacgagatccccgcgctatgtccggcaagctttgccgcggctttttcctgaagatcattttcaaacagattggaaacgtgccatacgctgccaagctgttctttcaccgcttccgtcaccgcatcatgacaatggccgagattggaaacggcgatgccctgaataaaatcgagatacgtttttccgttttcatcctctgcgattgtccctttcgcttttttaatatcgataggccagcggctgtaggtttgaaataggctgctcatgacacgctctccttttctttaacgatttttgttccttggaagacttgattggtgaaaaacgctccttttccgtttacgatcatcacttcctcgacatcttcactcagtgccgataatgccgagtttaccttcggaatcatcccccctgaaattacgccgtcatcgatgagggcctgaatttcttgcggcgtcaaagtatccagcctgttctctccgtccataattccttcgacatccgtgacaaataaaagtttatcggcgtgtaaggctgaagcgacggccgatgccgcggcgtctgcgttgacgttcagcgtttcgaaatcacttgtcatggaaagcggagcgataacgggaatgatgccttctttcattaatgcgtggatgattgacggatcggttttttgtatttcgccgacttctccgtatttgtcttgattaaggtaagacgcttgaaggagaccgccgtcctttcctgatattcccgcggctttcagcccgtttttcgcgagttcggttacgaaaaatttattgatcgtccctgacaagaccatttccgctgtttccagcaccggtttggtcgttttccgctgtccatcgacaaattccgtttcaatctgcaatgttttcagcattcttgaaatgtccgggcctcctccatgcacgacggcaaggttccagcccgattgcataagctcttttacattttgaaaaaaatcggcggataactcgcggattacactgccgccgcacttaaaaacgatggttttcttcatgccgctcccctttgctatgtgcgatagctcgcattgattttgatataatcataggttaagtcacagccccatgcccggccgctgccggagccttcctgcaggcggactgcaatcgtaatttcatcacctgataagtactccttggcatcagtttccgaaaacggctgaggttcgttgtgtttaaacagacactgaccgccgaggaaaacttccacttgttcggccgttacgcttgccgcactgtgcccgatggcgccgatgatgcgcccccagttggcgtctgtgccgtaaacggcggtcttcacaaggcttgagccgacgatttttttggcgataatattcgcctcaaggttatttttcgcgccttcgactctggcttcaattaatttcgtcgctccttcaccgtctctggcaatatctttggcaaggtcttcgcatacaagctttaacccctttttaaatgccggccagtcagggtgctgctccgtcaggcaatcattccccgcgcagccgttcgccatcacaagcaccatgtcattcgtcgatgtttctccgtcaacggtgatttggttaaatgaaacatccgtaatctctctgagcgcatttttgagcgactgttcttccacggccgcgtccgttgtgacaaagccgagcattgtcgccatgttggggtggatcatgccggagcctttcgccgctccgccgatcgtgatgatgtttccgccgatcaccagttcataacacgtctgtttcgtcactgtatccgtcgtcaaaatggcttcttcaaatgctccggacactgacggcgcttgaccgagctgttcaatgcccgcctgaatttttttcatgtctaaaagctcgccgatcaccccggttgacgaaaccgcaacaagctccggctcaatgccgagctggctcgcgaagccgtcccgcatttcataggcgtcctttaatccttggtctcccgtacaggcgttggcaatcgcgctgttgacgataaccgcctgaagcacggcctctttttttaagctctcttgcgtcactttcaagggcgctgcctgaaaatggctttgcgtatataccgccgcactgactgcaggcgcttcgctgataatcgctccgagatctttttttgaatagcgcagaccgcagtgcacgccctttgcctcaaaccctttcggcgaagatacgccgccttttactttcgtgatttcctcactcagctgaatcatattttcgaatccctctttcgttctatggatagactggcgtcatcgtaagtcccgtttcttcctgccagccattcatgatatttaaattttgaaccgcctgccctgcggcgcctttcatcagattatctatgacagaaacgatggtggcacggtttgttctttcatccacggtgacactgatatcacaaaaattgctgccgtatacctctttcgtcgccggaaattcaccttccggcctgattctgacaaaatatgaatctttgtagaattcggaatacaattctcttacctgtgcagcagacataccagggggagcctccgtatatatcgtcgccataatgccccttgtcatcggcgccaaatgtgcggaaaacgtgatcggacctgtgccgggctgccaagccgctaattgctgttcaatttccggagtatgctgatgctcattaaccttataaattttaaaattatcattcagctcagaataatgagtgcccatggatgcttttcggccggcaccggatacgcctgttttcgcatcaacaatcagaaaagaatcttgtaaaagcttattcttcgccagcggggcgagcccgagcagcacagccgtcggaaaacatcccggattggcaatcagcttagcagtctgaatctcttctttttgcagttcggctaaaccgtaaaccgcgctttgaatcgttcctttcggcgcggccttccgcttataccacttttcatacacggccgggttttgaatccgcagatcgccggatagatcaatgaccgggatgcccgcctccgccagcttgggcgaccactctccggaaacgccgggcggcgcggctataaacatgacatcaatttcgtttcgaatcgtttctatatgaagcggctgaagtgattgtgacgctatattcctcaaatgcggatatgaagcggcatattcttttccttcgtcgctcgatgaatataatatacaatcttctgcataagggtgatggttaagaatcctgacaagttcggcgcctccataaccagtcgcgcctataatacctattttcaacgggttcaccttcttggtttttgtgaaattatttaacattataacatgaataaaaattaattcaattgtatatttaatattttttcattcattttccatcggttttcgctgacaaaaaccccctctcgatcgagggggtttcataagaaaaacaggctgatcggatcagcctgtttttttcagcatcatcagcccgcttataaaaaacagcacggagctggcgtaaaaaataatataaaccgtgaagaaatcagcgagaaacccgccgagaataatggcggcagctgaaaatacggccgtccagaaatgatagctgccgacttttttcccccgctccccgccgtcagtgtaatcggcgatcatgattttctcgccgtgtttttgcatggcgccgaacaggcccaaaagcacctgcaccacataaacctggtgcacgccggtaatgtgcgggagcgtcagaagaagcaccgccatcccccacgaattcgccatcaggaaccagcggggatccagtcttgccgacagccggccgagcagcggatgaatcaatgcgccgctcaggccgaacaagccgtatgatagaccgaattgagtgtagctggaaccgatgtttttaataaataaaatataaaacggaaagatcaggctgccggcaaaaaagacactgctctgagacaggatcagccattttaaatggttgtgtttcatgatttgtacctctgataaaaataattcataaacaagtcatcgggatcatatttgtgttttttctgaaagaacatatcgcttttcggatatgcctcgcgcatctgctctttcgtttgatacagcatatacggcagataatagctgccgcggtggcgcaacgccgtatccgtcatttttctgacaatccgcgctgcactcgcctggctgtcttttgaaaacccttcattgattaaaagaacgagtgaaaacatgtcttcctttgcgtatgacagatcggctttttcatttttttgcacgtagcggatcgtaatatttacgagattgagatcttcatgtgacagcgtcttgcgtaaatcatgaatgtacggtgcaaattcgccgacgggcacgaagtattcttgaagcacgtcggtgttgtccgtgttttcatattccaaaaatttcgattctgaccgcatgacattgttcctggagactttcacgccgttttgactgagaaaataagactgctgggttgaccagaaccaatttcttccccagtcataccggcgggagaggccgagcgcgaatttcgtcagcgccggatgctcatcttctttcagttcattgtgccgctttaattctttctggttgtctgagagtgtgtaatcagtcacatacatatcgtgcaaaaagcctttatcccctgttgcgatccgcgcgagatgcatgcgcacggcggggttgcgctgaacatgctgcgtaaaatattgactgtatgtatcagcgttcatgcgtttcgttttcatttcataaagctcatcatccgtcagctcaatatccgcgtcaaggatgacgccgaacaggccgtagccgccgatgacggctgaaaacaggtcatctttcggagtaacggtgatgactttgccgtccgcctttaaaagatgaaacgatttgaccgtatcaatcagcgaaccgtaccggatatcccggccgtgggcgttggcgctcagtgagcccccgatcgtaaaaatgttttgcgattgcatgacttttaccgcgagcccgtacggattgacatagcgctgaatatcattccacgtcgctcccgcctgcactctgatgatttttttctttcggtcgagaccgagtattttgttgtagcccgtcatgtcgagaacgatgccgtcttcataatacgtctggccgcccattgagtgctgggcgcctgcgattgagatcttcaaatgctttctctttgcttccttaatcgtttcgaccaatgtttctttctcttttcctttgaccgtctgcttaattttcacgggcatgagacggcttacatccgtcattgtccctgcctgccgctccggctctttgtgaaaggcggaaacagcgaacagcgccgtataaacaagaatgctaaggataatgagaagtaattttttcttcatgggttcctccctcgcatgcagccggtctattatatcatgcctccgtccgtttttttcctttttaacccgataccgcaaaaaaccccgaatggcgggaaacttgttttttttagtgacttgcccttctttccgcacgccggtctgcagcgacaaagcagacgcgtccggcagaatcatgtttagtacagttcaaaacggtcatccggaaaacaccaggcataaaaaatacacagaaatccctaaaaatgattttttagtcagtatataatcgatatatatgcagatgtattaccaaagggattgtttaaaacaaagatgttaaatgaggtggggaaaatgaacataaaagggatcaatcatcttcttttttctgtttcagatttggaaaaatctatagaattttatgagaaagtatttcatgcacaacttctggttaaagggcaaaaaacagcatattttgatctgaacgggctttggcttgcacttaacttagaggcggatataccaagaaatgaaatacataaatcctatacgcatacggcctttacaattgacccaaaagattttgatgcaatacttcaaaggttaaaaaatctaaatgtaaatatattaaatgggcgtcctagggataagcaagatcaaaagtcaatttattttactgatcccgatggacataaatttgaattccgcacaggtacactccaagacagactgtcctattacaaaaaagataaacctcatatgaaattttatatataaaggtttgtttgcaatccaaaacaagccctcactgtcgcttatatgcagacaaaagaaaagcacctccaaactttaggatgtacctaaaatccggggtgcattttcttattactgaatccctaatgcgatttttgcgtagcgtgacattttgtctcttgtccacggcggattccagacgatgtggacctccgtctcttttacatccggaatgtcggcgagcgcttttttcacctcgtcgacgatgatcggagcgagcgggcaccccattgatgtcagtgtcatcgtaacgtgcgtcaggccgtcgtcatccatatcaacgtcgtatacaaggccgagattgacgatatcgacgccgagctcagggtcaacaacctgctccaaggcgcccatgatgttttcttttaatgcttcttccacgttccatcactcctttttcctcagtataacgcaaaagcggcttttgttaacacctttgtgctttataaatgcttatcgaaccaggcgacggtttctaaaacggcgtatctcgggactttatgatcagcccgttcgtctttcagaaactgaagatggtcgggccggctgctgtaatgaggtttaatcgtttcataaaagccgcgggtcggtgcatacggaacgactttgtcttgaacgccgtgccagaacagcagcgggcggctgcggagtttttccggttccagactgagatcgaacggtttgagccgcgcaaacagttcatcgacctgttcttttgtgacgtcaatgtcgatgtccttcttttgaatgtggtcaatctgctgctgaaaaaatgccgtatagttcggacttcccatcagactgacgccggctttgacccaatcatacgcagccatcgcgccgaatgtcgtaattccgcccattgacgtccccgcaagaccgatccgcccgtcttcaatcagaccgcgcccttcaaaatcctttttcagcacgtcaagctcctcgatttcatttaagacaatgtcccaaaaatggacggcgagctcttctgctgacagctgttcagcgcgttcaccgtggtaaagagcttccggcagcacggctctgaaacccttttcagcaagcaggtaagcgaaatgaagattatgctccttcgcgcttgtaaaaccgtgaataaagaaaacaaggggagcgggacggtcccgattttcttcttttacaatatgtaaaaacggaatgcctgatacggtttgatgatcaataagaatcacgttgactccctccttaggataaccataatcataagtgtaacatgtagacaataaagatggtaaaaagctacactgtacataagagaaaaacagcaaattatatgacaaaaggagttatttatggagacaaaaccttacctcatcgccttagatctggatggaaccttattaaaagatgataaaaccatttcccctgaaacggcacggacgattcagacgctgaaagaagcgggccatcatgtctgcatctcaaccggccgccctttccgttccagttcgatgtattatgacgagcttgggctgacaacgccgattgtcaattttaacggagcgtttgtccaccacccgaaagacgagtcatggggacgataccacacgtctttatctgtcgatgtggtcagacagcttgccgaacttacagagacctaccaaatacataatgtgctcgctgagatcattgatgatgtgtacttccattatcatgatgagcatttaattgaggcgtttcatatgaatacggcgaatgtcacattcggcgatctgcgcgaaacggtccaagaggatgtgacgtccgtattgattcacgcgaaggaagaggacgtcgcggacatacgcgcgcatttatccgatgtgcacgccgaggtcattgaccacagaagatgggcggctccttggcatgtgattgaaattattaaacacgggatgaataaagcggtcggcctgaagaaaatcagcgactattaccaagtgccgagagaacggatcatcgcgttcggcgacgaagacaacgatcttgaaatgctccgatttgccgggtgcggcgtagcgatgggaaacggcacggatgaagtcaaacaggccgccgatcgcgtcacgggttcaaatgaagcggacggaatcgccgaatttttaaaatcctatttctccctgtgaggttttcccgctcataacacaaagccttccgcccatactaaaacagacgactcatctcgtctaaatatggaagggggacattgcaatgggtaaacgaaacaaatcaaaacggtttattcagcaaggcaaggactctgtcagtcttcatgacgcaagatttccatatcggtctacattagaggaagcacagcatgatgcagcaaaagattcggctgaaaggcaggttgacttttaatgagaaacgaactgttttctcaagccaagtcatttgtccagcaggccgtcatgattgctaacggtttcgaggacggcgaccaggaaaaagctgtctcacgcgccaaaaatgccgtgtcttccgcgtacgccaattcgacggatgcagaacgtcagcagctgcaccaatttcaggatcagctggagaaattgcaataaaaaaaggcgccccgtttagatgagggcgccgcttttttatattacttcaaatgtttttaccgttttcagtctttttccgatctgatcggacttccctaaaaacgtcaccgtcaccgtgtatgttcccggaccgggcacgttcttccacacatctgaaaagtcatacgtttcattcggcattaaggtcacggtctgaaacgcctgggtaaacattttgtcttttgaatagcggtacagttctttgtgatgttggtcatgtacggtcagttcgaatttctgccctgagctgaatgtgaaatcgatcgggctttcgcttttgttttttaaagacatttgaaattcgatctgctgatctgtctgcacaggatttacggctaattccgcttgctgttcattcatctctccggatacctcctcagcgggctccttctgcccggattgactgctgcatccgatcaataaaatgaccggtaataacaggccaaacagccacttcattctatccgctcctatcagtcttttctgaagaaaccaaagatccccgtcgtttgcacgatgtttgtgaaggctttcgggtcgacttctttcacgattttctcaaggtcatacaattcgtaccgcgtgatgacgatgatcatcatttctttctgttcgtttgtgtaagcgccttttgccggcaccgtcgtaatgcctcggaccattttcccgtaaatcgcttctttgatttcatcagctttttttgtaacgatcatggcggtcagtttcatgtggcgcgtgtgaatggcgtcaatcacccttgttgtgacatacagagcgacaagggtatataatgctttctcccatccttgcaataatcctgccgtcaaaatgataatcccgttcaaaatgaagaaatatgtgccgaccggtttatccttccatttggccagcaccatcgacacgatatcaagaccgcctgtcgaagcgccgaatttcagcgttaaaccgatgccgatagctgagatgactcctccgaatacggtattcagaagaatatcgtgtgacagtctcatttccgggagaatccccataaagacggacgtcagcgctacgcttaatatgctgtatacggtgaatgatctgccgactttcagccaccctaacacaccgatgggaatgtttaagaggaacatgagaactcctgtcgaaatataaaagggggcgtattgatcaacgacgcttgacagcagctgggcgacaccggtaaaaccgctggaatatacatttgccggtatcaggaataaattcagtcccgccgcatacagaaacgcgccgatgacgacgattgctaatttttttacttgttctagtaccatggcttgctcctccgctcattttcattattagcttttcccttaaaataaagttttgaacactattttgccaaatttatatgatatagttggcatcactctcaccaaccggaaagaagggaattatgatgacagttcaccttattgctgacagcgcctctgacctgccgaaatcttatattgaagaaaaccggatcgggttcattccgctgcacgtaacacttgacggaaacgaatatgaggacgcggtcaccattcaggcggatcatatctttcaagcgatgcgggaagggaaagttccgaaaacatcccaggcatcaccggatacgataaaaaaagtatttttacaatacgcggaactgggagaaccggcgatatacatcgccttttcctcaggtctttccggcacctatcagacggccgtaatgatcgccaatgaagtaaaagaggaatttcccgattttgatttacggattgtagattccaaatgcgcttcattgggctgcggcctcgcggtgatgcacgcgcaaacactctgtgttaacgggaatacaatacaagaaatcgaaacgtctgtaaagaacttttgcgcacggatgaaacatatatttacggtcgatgacgtcgcctatctcgcacggggcggcagaatttcaaaaacgtccgcttttgtcgggggcttttgaacatcaaaccgattctgcatgtggatgacggcaggctcgtgccgctcgaaaaattgcgcggacagaagaaactgtttaaacggattatagaaatgatgaaggaagaaggcggcgattgggcggatcaaaccgtgggaatcagctatgcagataatgaagagacggcgattgggatgaaggaaatgattgaagaagcgttccatccgaaagaaatcattcttcattcaatcggctctgcgatcggcgcccactccgggccgggcacgctcgcgatttttttcctgaagccataatttcaatgcgggcgggcatcctaacggacagaagggaggctttgccgcatgaaagatgatgacaaaaaaccgttggacaataacgccgtaaaccagaaaaagaaccggcttgccgaaaaaaaccggcaggcgggaaaaaaccagaattccaaaaaaccggaccatctgtaaaagcaaaacagccctcttgtcttaggagaaagagggctgttttttgcgcacggatgtctgttacaaagtaaaccggcggacctgatcgtttaaccgctctgtcaggctcaccagattattgacgctttccgccattttatgaaaagaagacagctgctcaagcgcggaggcagaaatctcttcgcttcctgcagccgtttcctgaacgacggcgctgatgctttcggcatgatgcagcacttgctcaccaagctgtttcgattcgatgatccgtccgtccaattgagtaagctccgccttaatatgggcggctttttgttcaatatgggcgaatgattctgacgttttctccatcagctcctgctgtctgtccgctaaagcgacgccggtcgtgacagctccggtaatagatgtgatgccgtcttcaatttgctttaccatatcgaaaatctgcgcggtcgctttggctgatccgtctgcgagcttccgtatctcctcggcaacgacggcaaatccttttccggcctcgcctgctctggccgcctcgattgcggcgtttaaggacagcagattggtctggcccgcaatgtcggaaacggtctgcgccatcatactgatgcctgccgcatgcttagcggctttgtccgcatcgtccgtcatcgtttttttgagcgccgccagtttatccgagctgcttttcatatagctttgtacatcttctttctgggcgtctgcgagcgtataggaatagccggtgatgctttcttttaacgtattaaggtcggcttttgcttcctggacgtttaacagcgcgtccacttcatcttcatttgaagcctgaatcttcatcatgtttacgatggtaaagccgatgacggcggcgaagcaaatcatcgtaacggctgcgttaacgagcagccttgtccgtaatgtcacttcagatcgcctcctttttcaatcagactgtttttcatatccgtgatctttttcgtcagcccgcctgcgtttttgacaactctgatcttggctaagtccatgccgttttccttcagtccgtaaacgatctcaccgcttttgatctccttgttgtcttttaaatctttcgccaattcatagatgacatggtcgacgtttttcactaaagaagagataacggcgtgctcggcggtgtaatattgatcgctgtcaacaccgatggcgtatacttttcgcgcctccgcttctttcagtgcgccgacacccgtgaagccggccgccgtaaacaggacatcggcttttcttcggatcatgttttgggcgatgcgcttcccgagcttatcatcatcaaacgtaccgctgatttccgacagcacgcggatgttcggtttgactgattccgcgcctttcaggtagcctttcttaaaccgtttaatgacgtcggcatctgaaccgccgataaatccgatcgtgccggttttgctcgtcatagccgcgagcgctccggctaagaagcctccttcatcctctttaaacgtgacggaggtgacattatccaggtctgatacagaatcaatcagcacaaaccgctgcttcggatattttttggcgaccttttctaaatccgcctgcatgctgtaaccgagccccacaacaagatcattgccttcccggacaagctgggtcagtcctttttcgtacgtaccggtgtcttttatttctctgtaatcaaatgtgatgccgagctcgtctcttgctttcatcaaaccttgaaagcctgaatcattaaatgattggtcgccgaggccgttgtctgtcagcatgatgccgattgttttcgttttttcagccgccgcccctcggatttgccggcacatcccgccgtgctgagcgcaagcagcagtacagccgcaaatatcgccatttttctcattgaaactctccttttgtttttttctatagttatatatcggttcggatgtcagaatattttatttcaataaaatatgtatgttcggcaggttgataaacaaatgagggcataggagcttttgagaaaataaaaaacaccggttttggttcaccgatgtttttgcagaaaatttattgtttttcgtatgtccagccgtctttctgatacactttgccgtttttcatcaggtgcccgagcgcccgcttaaaggcggctttgcttaaatgaaaccgttcgcggatatcgtcaggatcgcttttgtctccgtaaggcatcgcgccgtttcttgatctcagataggtcagaatctcctccgcgtcaaccgaaagcgcatcctgctttctcggcagcagggacatgttgacggagccgtcttccttcacctcgatgacacgccccgtcacgcggctgccgagtctcggctcttcttttctttctgaagggtgaataaacgcgcggatgccttcatcggtaatcagaaaagagcctgatgcgatcagtctgtacaccgtgcctgtcaggtctttattcatgacgtcttcctctgcatccgtaaataattcactgatgatatcctcaggcgccggcttggcaaacatgcgtccgcggcttgtcaccttcagcatgcaatacagtctgtcgcctttttgcggccagacggatttgtacggaggcaggtgctccgttgcgacgagcgcgtcttttgacagaccgacgtcgacgaatacgcccatatcctccacagcgtccgtcacttccacccatccgtagtcataaaagctgatgagcggctttttcatcgtcgccgcgagtctttcctgatgatcgacgtaaataaatacgtccacttcatctctgtcttcaatatcctctgtaatttcactgttatgtaaaagaaccgtatcctcgccgtcggttaaaaaataaccgaaatcggtttggtgatctatactaagcgtgagctgctgccctggtctcatgttatcgtccttcctgattcgcccgtatggggctgatgtttttctcattttttccaatatgcataaattcatgctttatgcagttggacatttctctttattctactataatcaactcataagtgaaatgttataggaggttttctcatggcaaaagaaagttcttttgatattgtatccaaagttgaatttcccgaagtgcagaatgcgattcagatgacgctgaaagaaatcggcacgcgctatgactttaaaggatctaaaagcgatgtaactttagaaaaggaagaacttgtcctgatttctgatgacgagtttaaactgaatcagctcaaagatgtgctgagcggcaagctgatcaaacgggacgtgccgacaaaaaacattgaatacggcaaaatcgaaaatgcctcagggggcacggtgcgccagcgcgcgaagcttgtacagggcattgataaagacagcgccaaaaaaatcaacgcggtgattaaaaactccggcttgaaggtaaagtcgcagattcaggacgaccaagtgcgcgtcaccggaaaaaataaagatgatctgcagcagattattgcagccgtccgcggggcagacctgccgattgacgttcaatttattaattttagataaattatgtgattcctattgattattgtctctattttcggtaaatttggagaaagggattttcacagttaagttttggaaacccatgacaattacatgaacgttcttatcaagagaagccgagggactggcccgacgacgcttcagcaaccggtgtaatggtttaacccaaaccatgaccaaggtgctaaatccagcaagctaaaaacagcttggaagataagaagagagacaaatgattacagagtcttcttcttaagaagactttttttatttctcttttttccttgctgaatgtgacgaaggaggcaaacaatgggactattacaagacttaaaagaacggattttaatcggagacggcgcgatgggcactctcctctattcctacggcattgacagatgttttgaggaactgaacgtatcaaagcccgaggaaatcaagcggatacataaggcttacgtggaagccggggcagacatcatccagacaaatacgtacggcgcgaattttattaagctctcaagatacggacttgaggatgaaacgaaaaaaatcaatcaggaggcggtcagaatcgcgcgcgcttcctcagacggcgcttatgtattgggaacgatgggcggcatccgcacatttaacaaaaacgcctacagcctggaggagattaaacgcagctttcgggagcagctttatttattgcttcacgaagagccggacggtctgctcctggaaacatactatgatttagaagaggcgcgcgaagtgctgaagatagcgagaaaagaaacggaacttccgattatgctgaatgtatccatgcacgaacagggcgtgctgcaggacggaacgccgcttcgggaagccctcaggtcaattgccgatctcggcgctgacataacgggaatcaattgccggctcggcccgtaccacatgattgaagcgctcaccgaagtgccgatattccgtgacacttatttatcggtctatccgaacagcagcctcccgtctttagaagaaggccggcttgtttatgatacggacgatgcctatttccgggagagcgccgtacagttccgcactcagggcgcgcgcattatcggcggctgctgcggtacgacgccaaaccatatcagagccatggctgaagcggtccgcggactttcccccgtcactgataaagaagtgaaaatcagacgggaagaagaagtcatctccgtccggaatgaacggaccgagccgggtttaaacgaaatcgccgctcaaaaacggtcaattatcgtagagcttgatccgccgaaaaaattgaattttgacaaatttctgcaagcggcggctgaattaaaagaaaccggcatagaagcgctgacgctcgccgacaattcattggcgacaccgcggatcagcaatgccgcctgcggttcattgctgaaagaacgccttgatatccgttctctcgttcacattacatgcagagaccgcaacatcatcggccttcagtcacatttaatggggctggatacgctcgggcttaccgacattttagccatcacgggcgatccttcaaaaatcggcgactttccgggggctacctccgtctatgatttaacgtcctttgacttgatcaggctgattaaacaattcaacgaaggcatttctttatcagggaaaccgctcggcaagaaaacgaacttttccgtagccggagcatttaatccgaatgtccgccatcttgataaagcggtaaaacggctggagaaaaaaatcgagtgcggagctgactacttcgtgtcccagcctgtctactcggagcagcagctcattgacattcatcatgaaacgaaacatctcaaaacaccggtgtatatcggaattatgccgttaacgagcagccgcaacgcagagtttattcatcatgaaatcccgggcattaagctgtcagacagcatccgggaaaaaatggcgctcgccggcgaagacaagcaaaagcagaaagccgaaggcctcgccatcgccaagtcgcttctcgacacggcgtgcgaactgtttaacggaatttatttaatcaccccgtttctccgttctgatttgacatcagaacttgcagcttatattaagcaaaaggatgaaaagcgggctgatgtatatttgcattgacgcggaagatgccgcctgatacgacaggcggctttttcatggtacgatacagaaaaagaatcaagcaaaggaggattttttcatggttgaagtaaaacccatcaccgcagaagacacatacgcgatcagacacagcgtgctgcgcccccatcagacgattgaggattgtaaatatgatcaggacagcgtcaaaggagcatttcatctcggaggtttttacgacgggacattgatcagcatcgcttctttctacccgcagaaccagcaggctttacaggcggcgcccgcctaccagctgcgcggcatggcaacgcttgaagaataccggacgcaaaaagcgggaagcacgttaatcgcctatgcggaacgaaaactggcagatatgggggcggcgcttgtctggtgcaacgccagatgtcacgtgaagggatattacgaaaagctcggctggaaaagcacgggcagcccctttgacatacccggcatcggcccgcatgtgatcatgtataaagaactcgcctgaaacaggcaaaagcccgtggcatctcttataagggctttgttttgttatctttcggcgtgccggatgacgttcaaacggaatgaagcttttataagcgccgctattgacgcgatcccgctttgatattaacctttgttcagtaaacaacacgcaattcggcaagggtgggcaggggcgaaaacgatatctgccaattgccgatttcagctattatgtttagaaaagggagtatgagatgaatacgatccaaaaaccgaaaatcccgaaagaattgccggtgctttctttcactgaagcgcttcaggatgaggagctcaaagaagtcatcattgaaaacggcatcgtaaacggcaaactggacggcctgcgcgccgaaaaagtcattttcagaaacaccgtttttacggatgtctctttcagacatatggaatgtacggatgtcctgtttgacaaatgcgatgtctcaaacgctgatttcagcggaagcatcatccatagaacggcgtttcagcattcaaaacttctcggcttgaatctggcggattccgccatgcgtcatgtacggtttgaagactgcctcgcaaattacagctccttcagctattccaatatgaagcatgtccgttttgactcgtgcggcctttcagaaagtgagtggaatgatgctgttcttgaatacacagatcttgacgtctgtgatttgaacggcgcaaacttcatcggcacgtctctttttaatatggatatcagcacgtgcacatttgatcatctgcacgtctcgcttgataagctgaaaggatgccgcatctctccgtctcatgccgttacattcgcagaagcgctcggcgccatcgtgacgtgattttttattaaacgaaaccgcggatacaggcggccggctccccggcatcctgaatcaatgctcggcattggtgatgtggggtgctgctttttattttgcggcgcttttgtttcgataaaaggaattcggccaggtcatgttgaatgtaccggaaggaagagggggaattggaatgtcagacattttaaagctgtatcactaccatagatgggccaatgagcaagttattcagcatctgaagaccctgcccgcggcaagcttacagcaggaactggatagtgtttttccgactttgaacgccgtgcttgtgcatatatgccgggctgattacacttggcttcacgtgctttacagagaaacttacgaacaaatcgtctcgcagtttgatcaatttgaaaagcttgacggagattttgaggcgattgaacatagaatgactgaactggacaaagaatacagcgaatttttaagagaatcggagaacatggaaggcccgatctccatttctcatccgcgcatgggaacgcttcggacgacatatgccgatgtgatccggcatattgtgaatcacggcacataccatcgcggcaatataagcgcgatgcttcaccaaatgggctataaaggcgtgccgactgactacatttttttctcatatgaattataaaaaagcaaaggcatgccgggcctttgcttttttacttcgaatctatcataatccggcatagccgggggcgcccggggtaagctttacaggccttccggttttaaaagattccgtcgcggcgatcccgatttttaagttaatcgcggcatcgatgtctgtcacaatcggcgtttccccttttttcacacattcggcaaagtgctcaagctccagacggtaagcgtctttaaagcgggcttgaaaatccggaataatttcgtagctgctgcctgactccgttaaaatggtgacatggcttttccgcagcgtgccgactaaaatgcttccctccgtcccgataatttccgcgcggatgtcatggccgtacggagaatttcggcttgcctccacatcgccggccgcgcccgaatcaaactcaagatatgttaatgcctgatcgacatcgccgcactcctccatgaacgggtgctttaaaatcctcccgtgcccgctgacagacgtaacctcggcattcatgagatatctcgcgatgtcgtaatcatgaatcgagcagtcaatgaaaagccctccgctatgtttgataaattccgcgggcggtgcgccttgatctcttgtaaatcctttataataaatgggtctgccgatttccccggcgtcgattcttcttttcgcgtcggcgtatgccggatcaaaccgcctcataaaaccgacctggcagatgacgtccgtttcttcgatttttttcatgacttttatcgattcctcaagactcagggtgagcggcttttcaacaaagatgtgcttgccgttttcagccgccttcatgatcatttccgcatgtgtgcttgtcggcgtgacaatgatgacggcgtcaatcgtgagatcttccagcagttcatacggattctccgtccatttggcgattcctaattctttcgcacacgcttccgccttccccttcatcgggtcacagacggccgcaagctcggctccccgcacttcgccggctaaatgcttcgcatgaaaataccctaatcgtcctaatcccagcaccgcacacctgacttgatctgtcatctatcaccgctccttttttcttgaggccgcatgccgtaatggcgcaagcggtttctcttattaaacagaaatcattattttgaaagcgctttatttacaactcaagctgtttgctttctttgcttgcaatccgcagtatttgcgcaagcgctttctcaaaagctgttttaattttacaatgcttttcgctcgtttgacaatgtttttcacagaaaaaaacgcgccttatcgctgagggcgcgtttttaccggtgccgtagaatgcctgatgacgagttccggagataaaatgattttgctttttgtttttttcttcccttgaatctcatcaatgagaagttcaacgacacgccgccccatttcgcggatcggctgagaaatcgtcgtgagcggcggtgccgtcatttcagcgagaatggtattgtcaaagccgatgacggacaagtcttccggcacccgaatgccccgggagcgcgccgcctgtatcgccgcacatgacaagacatcattaaaggcgaaaacggcggtcggaaggtctctgtcaaacagctcgcccgctgcctgttttccgctttccagcgaatattccgtcggtatgatcagcgattcatctagtgtcatccccgcttcccgcagcgctttttgaaaacctttgattctgtctctttcacccgtggtcgaaccgtttccgacgatacaggcgattctttcatggcctaaagatatgagatgctcagccgccgtatagccgccgagaaagtcatcgataatgacgacgtccatcggcgcgagcggtttatcctgcgtaatcatcgcaagcgggatgcccgatttcacaatatcatcaagcgccgtgacgctgtcatcatgatcaagtcccgtcgcgaatataatgccgtccgcctgcttctgccgcagcatcgaaaaatacttcgtttctttttcaggctgataatcggtgctgcagataatgatatgaaacccaagtacaccggcgctgtcttcaatgcttttcgccagttccccgaaaaacgggtttgaaatgtccggggtgatcaggccgatcatattcgtctttttgcccgtcaaagcggatgcgtgaacattcggatgatagtccatctcctccatgacacggagcaccatccggcgggttttgtcactgatcctccccgtattgttgatgacccgcgagacggtcgagatggagacgcccgctttttcggccacgtcgtaaattgtcattttcatgcttaccgatccctcttctgttctctggtattaggtcagtccgttttccggcttacgaatttgcggtattcaagcggcgaaatgccttcaatctgtttaaacagtttggaaaaataggttgggtcctccatgccgatggcgtccgcgatcgcccccattttgtcattggttgcggacaaaagacgtttcgcctccgtcattctgactttgttcgtatactggccgggcgtgacgccgagcacctgctgcatgcagcgggtcacgtagtcttggttgtaatgaagtgccgaagagagcgctttgatggttgttttctcctgatagtgctcctgcaggtaccgggcggcctcccatgcgactctttcctttgcggacgggatttggaacgcttctttctgaagatggagcagcagctcttcaaacagaatctgctttctgagcggcaggtcggagttctcggcgctttcatctgtcagcacactgaattgcccggccataaactgcgggcgtctcaccttccctttttgcggcagggacaagcggtagcgggacggctcttcaaagctccctttttttcgcctcagctccgaccagttgttcccggtggtttccgtcacctcataatccgctccttcaaaatgaagccacgaataggatgtcgtttcttcactgccttttgttccgtaatgttcaagcccgggagaaagcagaatatattctcccgcttcaacggaaaaggcgttttcgtcttctgtaatgtagaggacgccttctttcacatacagcagatcaaacaccgggaagacccgtctcacatgggtttcgccttttttgaacactccttctcccgcagcgataaagaccgggaacggagggactgtgaactcgagaaaggacatatttccggccctcctttttaagtcggatttttgcaagaagtttcgtttctctccctttttattataagaaaatggaggtacacttttaaacgttgattttttcaggaaaggggttaaaagaaatgaaacaagcgattttaaaacgggctgcattcaaacaatcctctgatcacaaactctcattatacgcgctgacttggccgatatttattgaggtttcattatatatgtttatgggaaacgccgacactcttatgcttagccaatactctgacaacagtgtggcggccgtgggtgtcagcaatcagattttaaatttaattatcgtgatgttcagctttatcgcaacgggtacgacaattgtgatttcacagtttttaggatctaaacagaaaaaagaggcgcaggaagtggcttatgtatcaataggagcgaactttgtcatcagtctcgccatcagcgccgccatattttttgcggccgttccgctgcttcatgtgatgggtctttccaatgaattgatgccggatgccaaagtctttttgcaggtggtcggcgggctgtccttcattcaggctttgattatgacgttcagcgccattttaaaaagctacggtcatacgaaggatacgatgttcgttacgatcgggatgaatattttaaatattggcggaaactttcttgtcattttcgggccgctcggccttccggtgttaggcgtcgccggtgttgcgatgtcaacgtcctttgcgcggatcatcgggctcatcgcgatgattgtgatcgtcaaaaaacgcatcggactcggtctgacatggcaaaagatttttcacgtccataaagagcacttgcggaaactcctgaaaatcgggattccgtctgccggcgaacagctgtcttataacatttcacaaatggttgtcacttattttatcgccattatgggcgctcaggcgcttacaacaaaggtttatacacaaaacatcaccatgtttatcctgctgttcggaacggcgatcagccagggcacacagattttgatcggcagatatatcggcgccaaacggtttgacgacgcttatgaccgctgcatgaaaagtctgtactgggcgcttggcattgccgctttgacatccgtgatcatgaccttgttttcaaagcagctgatcggaattttcacaagcagccctgacattattgcgacggcgagcatgctgatcgccatgacgatcattcttgagcccggccgttcatttaatgtcattatcatcaactcgctgcgggctgccggagatgcaaaattccccgtctacatggcgatgatttccatgtggggtatcggactgcctctcgcttatctgttcggcatccatttcggattggggcttatgggcatctggatttcatttatcgcggatgaatgggtcagaggcattcttatgtacagaagatggcggtcgcggatttggattcaaaaagggattgcataaacgccccgagcttcgttaagaagccgggcgtttttttatgcctgcgaaagccgttttctcatgtcaccgagctctgaccggtaatgtgccagcaaaccggtaacggcgggtcttgagtataacggaaacagctccagctcttcagacgcctcctcgaaatacgcctcggcctcgaatgcgatgtactcccatacattcataaaagctttgttgacggtatggctctccagctcttcttccgtatagccgaattgcatcatcacctggcgcgggagacgctttttcgaccactcatccgtatggaccctcagaagcacccgggtcagctgaatggctgctcctaatgaaacggctgcatggcggagtttctcttggttccggcgcgcgcaaaccggcagcagaagcaggccgagggctccgcctgtttggcccgcgtacatcagcaggtcatcaaactcttgatacgttactttttctctgtcagagatgtggccggcgataaactcacgcaacggctcttcttcaagtgcaaattgctgccgcacatcagtgagcgcctcccacaaaaagccgtcggcgcgtgccccgttcagaaagtcttgtgccgcctgttcaaatcccccaagttcctgcatatcaagccgatcagcttcgtgaaacaaagcaagcaccgcccatgcggcccgcctgttttttggcggcagggatgagaaagtccgtttatataaaggaaagtgcacctcggcaagatgggcgcatgtttcgtattcggtcatggtatcactcctctgttttttagtgtaccatatgtttcacaataaaaagaccgatatccttcagcggaaaccggtcgcggcactgttattcttctatatcgatacggtacgcctcaaaccatgtatggatctgggcaagatgggcgatcagctgcgggcctttcatcagctggccgaaccacggcacctgaaaagatgaaccttctgtctccagcagcatttccagcttctttctgtcaagcagggtgtgaagcacggaatctttctgttgtaaaatcgttttcagccattctgtgaccccctgcgtgtatttcgggtgatgcgttttcggataagggctttttttgcggtacaaaatatcttcaggaagcagtccttcaagcgctttccgcaaaatgcctttttcccggctgccatgcattttcatttcccaaggaatattccaaacgtattccacaagtctgtggtcggcgaacggcacccgtacttcaagacttgcgcccatgctcatgcggtctttgcggtcgagcagattggtcataaaccaaagcatatttaagtagaacagctgccgtctcgctttatctgttcccgtctcaccgtctaacagcggcgtttccgcaatggtttcttcatatctcgcattcacgtattctctaagattcagccgtttttgccacttttcatccaagagcgtgaccctctcctcagtcgacctcatccaaggaaatccgtcttcttctgccgcggtgtgaaaccacggatatccgccgaaaatttcgtccgcgcattctccggaaaggctcacgacaaaatcttttttaatttcccggcagaaccataatagcgatgaatcaacatcagccatgcccggcaggtctctgacgagaacggattcctccagatgttcaaccagctgatcctgcgtaatcacgcacttatgatgctgtgtgccgaatgcatttgtcattttatcgatccacgggccgtcatcattcggctgaaaggcgctcgctttaaaaaatttgctgttctcctcataatcaattgaataagtatgaaggggatctcttccttgtttctcaaaatgagcggcggctatcgcggttatcgcgctcgaatcaagcccccctgataaaaacgtgcaaaccggcacgtcagatacgagctggcgtgtcactgcatcctgaaataagtaccgaatgtgagcggcggtttcatcgaagctgtctgtatgcttttcgctctttacattccaataacgccatatggacaaaccgtcctttgagaaagtgaacgcatgggcgggacgcacctcgtgaattcctttaaacaccccgcagcccggagttctggacggcccgagtccgaatacttccgcaagtccgccgctgtctgtgcgggctttcacatcaggatgagcaagaatggctttcaattccgacccaaacagaaaggaagagccgtgttctttataaaaaaacggcttgacgccgagccggtctcttgccccgaagagccgctttcgcttttcatcccagatggcaaaagcgaaaataccgttcaagcggtccacgcactcctcccgccactcaatatagctgtgcagcagcacttctgtatcagaggtcctctcaaaacggtggcccctcgcctgaagctccttccgcaattcctccgtgttatacagctcgccattataaatgatggtgtacgtttcctcttgatgcgtgcaggccatcggctggcggccgccttcaatgtcaacgaccgaaagtcttttatgtccgaataaaacatggggctctccccagacgtttgaatcatcaggccctcgttttgaaagagtgtctatcatattgttcataatatgtttctcttggacgagctgcttttgaaaatcgacccaacccgcaattccacacatgtgatatcagctccaatcccgtttctgtcggtttcaaattcgtttctatcagcactttacccagtttatgcaaagaaacgcagatagttgatttgtcccactaagagttgtatgagacaagcccgatttggaaagaacggaagagaagaaacaaacaaaggagacgggcacggttatgaaacgaaaacagcttttctcagaaaaaaacaaatgggggcgcggcacactgatgatagaggacggcatctgcctcgtcgaaaacgatgaaggcgatatcctgcttgcagacagtctcggaaacgcagacgtattgatgaaacgcgacggcagatggcagccggcacggatttgcggcggttcggccgaaatcggcgcagacaccatccccctgctcggcggggaagaaatccgttatgaaaaggcggtcaaacggccgctgttaaccttgctcgattcgctggacgatgaaacgtttctgctgtttctcagccatctgcacgggttcggcctgtctgtatatgattgcgtattttcctataatcaggcgctgttttccggtgaaggcgtttcgttttatcacttctcggcggatgacgcacaatgcgccctgcagcatcaccgcggcagctcgggtaaacacgacagatttgaatggacggcatctgacgggcggcgctccattatgtattcagcggcaagacaagacggcaccgcgtaacaaacaggcggcaccttttaaataggtgccgcctgatgtattcagctttgtttttcacgctgattgacggccggcgtttgcttttacccttcacagccgtagcttttgcggcaacaagagtgattgacgcttttggcatcctggacatctctttcgcctcatcaacacggcatttctcattcagcggcccagttgcgcaactaaaaaaaacccggatgcatccgggtttttcaagcgattgattaaaatacgtgaaaaccgatcggcaagtgaaggcccagcagcaccgtcaggacgagcacgataataaaaccgatccacagtccgccggttgatttgccttttttcttgcggatgacgagcatttccatcagtccgatggtaatgatgccgagcagcatttttcctgcgtactctccgttccaattcgcaaaacggacaaaaagctcagctccggtcagaataataataatgtagaataagcgcagaatcatatgcgtaatttttgcgcccttcgcttttccggcaccgtacagcccgtagctgacaaacaccaggataagcgcaacgacccatgaagtaatatgccaatgtgtcattatgttcaattccccctatcagatcaatctgcctcatttatggtaccacaacaagccgctcggagcattatcaatcgtgcgaaagacacacaattatccgatttggttcgacagcgtgccgatcggttcaattgtaatgtcaatgcggtcccccggctttaaaaatttcggcggcttaaacccttttccgacaccggacggcgttcccgtcgctataatgtcaccggcttcaagcgtcatcccttttgacagcgtctcaattaattcagctatcggaaaaatcatgtcacccgttgatcctgattggcgcagttctccgttcacccgcgtttcaactttcaggctttgcggatcactgacggccgacttatgtacaatgaccgggcccatcggacatgtcgtatcgaggcttttgccgataaaaaactgtttatgttttttctgcagatcgcgcgctgtgatatcatttacaattgtatagccgaatatatgatcaagcgcatgttctttggagatgtgcgatccgctttttgatatgattaccgcaagctccccttcataatcaagctgctccgttacatccaagtggctgttcactgtttctccgtggcctgtaacggcagccggggctttcgtaaaaaccatgggatgctccggtatatccgcctcactccccatttcaacggcatgatcacgataatttttcccgatgcagatcacgttctttgaaggtctcggaataggcgcgcaaagctttacgtcagacagcgcatacataaatgaacccgactcgtcattcggttttttcgcccattccgcaagctgtccggcatgcgcgacgaacttatctcctttttgaatgcactcgatcagcgaacccggaatcgtctcaagttcaaacaattttttttcagccttttgcagatctaagattttgtcatcatcaataatcagaccgacaaattttcggctgttcagttcccctgttgcaaatttcatgttaatcccccatcatttttaaatggcattcctttatgtattcttcctccgggcgggaaatccctcttttaaacaggctgaaaataagtgtaaaagagtatcaaaaattgtcacttttttagtcatattgacgaaataaaaccttcttggccaaaatgggttatactattatcatcctatgttttccaaaataatcgagaattggagatcacacgatgaacaaaattgaagaaaaaagattaactttattcgagacagcgcaaaaattcggaatcaatgcgacggagaccatcaggtgcagccaggagctggacagccttttaaacgggtgccggggcgggctcatccaacaaacgaaagacagcgggccgaacccggccgcacagattcagcacggccgcgaaagaaaagaggctttctcataaacgtgatatgtatataaatctgtatcatttatgtataagacccggcatctgtaaagcgccggtgttttttacgtctaaagttttttccgctcacaaaaatgtgcatttgtcataagctattttaggcaggcagcccagataagctcctggagtgcagtcatgaaaatcttcacgaaaaggatgtgctcgtatgcccgcaattgtcggagcgtttaaaattaatgccgtcggtacgagcggagtcgttcatataggcgactgcatcaccatttctccaaaagcagaggttaagacatttgccggagcgggcagcttcaataccggagacaatctcacactgacgaattacaggaattcaacgaatgtgtacgataatgatgtaatcgatcagccgatggcaggaaacgcataaaggaggcgccgtatgaatttttacgtcaatcagtcgatccatatcaattacatgcgtgtagaatctgtcagcaattcctccatactgcaaatcggaagcgccggttcaattaaatctctttccaatctgtacaacacagggagttatgttgagccggcgccgcctgtcaccgcggggcagcaggctgtaacaacagggggaggtcccggcacctcatcatttgtaccgctccagccgccaagccggtagttttaatgaaggaaacgagacgcgaggtgaatgtcatgtatgatcaatccgtttcatcctacctgcagaatttaaattctttcgtccagcagcaggcgcagcagattcaggagctcgaacggcagctgaaagaattccaaaatgaaatttcaacgctgaagcagcagccttctacaagaatcgatcggctcgagtataaatttgatcagctgaaaattgaacggctggaaggaacgctgaatatcggattgaatccgactgatccgaatgccgtgcaaaacttcgaagtcggccagacatctccgcaggtcggaatgatgcagcaggaacaggcgggccagcaaatgcagcaaatccgtcaaaacgtcgatatgtacctgaatgaagaaatccccgcgcttttagagcagctcgaaactcagtatgagagcaggctggacgaaacgaacaaatatcatattattgaagatatcagaaagcagatggacagccggattcagtattatctgtcccatgtcccgaaagaagaaaatacggcgcccgcgcaatatgccgagcagattgccgaacatgtgaagcgtgatattgtcagggccgtcgagcactttattaaacacatacctggtgaaatgaaaggtgatgatccgtcatgatttttacagtgattaaccggaatattgaagtcggcgacatccggtctactggtgtatccagttcttccttattattaatcggcgacaccgattccgtctatctgtcttccatctttgacacgcctccggaatctcttattatcgggccttatgtgccgctggcgccggaataatgttaaagcgcatttcacgcctccggaacgccaaaatcaattcagtcgggattgcgagtgtctttcaagcaggcgatacgaatgaaatcaatatgcggatcaaagtattggccgatcagcgcagtcttgctgtatacagagatgatgaaggctcatttaacaaaaaagaataccagatctttcggcagccggccgtcatgccgttaccggaaacgggagtccaaagcgcattctgccatgaaaatccttcaattcgggtaaggaatgtgaaagttcaaggggtatcgtcagcgtccgtggttcaaatcggatcgacgtcggtcgttctgggagattcgcggctgaaacatattaggcagatcttcacgccaagctcacaatcacagcagccctgacatataatgacggtgagacttctataaagggtgtcgtttatgccagcaattaccggacctatagctatcaattccatatcgggcggagtcgtaaactttggtgattccttttacctttctccaaaaagctcttctaaatctgcgctcggttcgggagcaggcaataccggagatttcctgttattaaacaacgttgtcaatgcgacaaactatatagaccccgatgtcagcgatcaaaatgtggtcggaaacgcctaaaaagcagccgctctttcagaagagggctgcttttggttcagcgttattttcgttcatttgctttttttgtttttacaagcttttccggcggctgttttctgatccatttcacaaaccgcgcgagtttcgggtcacgccgcagctcttctattcccgcgagccttgccgcaagctcctgattcgtatagagcgcgtgaacctgtttatgacaagggatgcagagcattgcggtcggaaggaatgtcccgccttcttccttaggcgttaagtggtgctccgtcagccgcacataatggcggccgcataattcacatgtaccctcggcagaatcggccataattccttctcctttctacatgatctccaatgtgacccgggtgcctttcccgcccggttcggacggatgaacgattaattttttcggcagacgcgctctcagctcctgcacatggctgatcactccgacggataagttgtccgattgcagcttttcgagcgctgtgacaacggtgtctaagagcccttggtcaagagtcccgaatccttcatctaagaaaaagaattgcagcgggtattgcccccgcagctgaatctgggcggacaaggccagcgcaagcgacagcgatgtcagaaacgtctccccgccggaaaggcttgatacgggccgtttgacgcctccgttcgcgtcatcacgcatgacgaaaccgccttctgaatcgactaatatggcataccgctgccttgtcagcgctccgagacgggcagaggcgtcccgagccacgctttccagctgttcttccgctaaaaattcgacgaatgtattgcctttacatacagactggagcttatcaagcctgtcaatctgtgtctgccagtttttcagttcggcttcaatctctttaaagcgcttatgctgtttttgcataaccgcgaaggcttttgcctgtgctcctttttcctccatggcggcgcctgactcagcctctgcctgcttcagcagagaaacggatgctgtccattcttcctccgatatccggcgctcggctaatttatcagtaacacggctgatatttgccgatagctgttttgaggtgtccagaaactcatcaatttcttttttcatttcctctgcacgcccttgcggaagcagactttttttaacttggtccggttcggtaaacccggtgtcttttgacctcacgcgccagtcgttttgcgctttctcaagagaggcctcagcatccctgagtgacatgagactccctgattcccggccttttgcgtcattcagcgattgctgcgcctgcttcagcgcatcgaatagggactgttcttttgattttaacagctgtaattcctgccgcaccgcttcaagctttgcggaaattgatgtttcttcagctgctgttccgagctcttgttcatatccgtcaatcacctgctgcaggcgctcagacgcatagtgaagctcgagccgttcccgttcaagccgatgcttcatctcctgcaggcgttctttctcctcttcatgttccttgaggaatgcgatgcttgtttcaatgcgcttctcacattcttctgcctgcctgtccttctcatctatcgaagcctgccaggcgtcaatccggtttggcggaatatgaccgcagacttcgttgtactgattcaatcggctttctgacagcgattcaagctcttctaatgaatgtctgagacggtcggcttctttttcctcgtagcggattcgttcggcaagctgctcagcttgttttaccgtctgctgatgcgcgctgatcagtcttgcgaccttctcttttaccgacagcatatcctgtttcatttgtttccattccaagcggacggcgctgaacgcttcatcaagcgggcgtccgctgatggaagaagcggcttccagctccggaacccgggcgctttgcagaaacggacattcttcggtaaaacgccccgactgttcttctaatgcaaccttggctgtcagcacttcctgagaaagagccgccgcctcagaaagcagtgcttccacctgctgcaaatgttcctgcacagcggtatcaggcgagaatgtttcatgagcggaacgcgggcggtcatgctgcgtcgagccgcatacaggacaaggctttccttcgatcagtttttccgataattcttttgttaatgcagccgttctcgcttcctctgagcgcctgcggagatcggcttgcgttttttcagcccgttcggctgcggctttcagtgaacgttccgtttcacagaccatatggtaaacggtttgcagcgtttgataagcgcgcgtaatgtcttcctcttccgttttcgctttcgctgtgagcgactcgctttctccgttgagcttctccacgtttttcagctgcgttgtcagattggcccgctctttcgtgatttgttcctgtgtctgctgaaagcctgccgccagctgtgctgcggtctggcattttttccgttcatctgcggtcacttgaactgctttcagctcttctttcagctcattctgcctgttttggccgcgggtcaggcggtctttcactgcggccagctgtttcgaggcggcttcgtattcttcctcttttttgctgtgctccgcatttgttttttccgcttcttttttcgcttcaagcagtttttgttcaatggctgaaagtctttgatacagctcttcttccttgacaagtttcggctcctgttcggccttatgggcgcgccatgcttcataggcttcattttgccgggtaaatgaaacggtttccgcctctgatttccgtttggccagttcgtgttcctgttcggctcgctgcttccggcggacggcttcggtgcagcggtctgcgtacggctcaagggcgagagctgtttccgcctctttaagacgctcagtcaaatccgtgatgtacgggcgtctttcctcaagctttttctcccggcgctcatattcatctctttctgtctgcaagttccaaatttcctggtgattttcaaaacgctcttttgcccggacccgtttcttctcagctgcttcaagccgttcgttcgcttcgtgaaactgctgttcagcctgcttcagcgcatcttctcctgcgtctccgaggccggattgttcggccagcatttcattttttttcgctgccgcttcctgcgcccgccgccgcaattttttgacaagcctgtcccgtactgttccagattaaacagacgctggagcatatgtcttctttccgcgcctttaagcgacagaaactcggcaaactttccttgcggcagcacgacggctcttgtaaagtcgtcaatggtcaggccaagaagctcctctacctttttgttcacttcattcgctttatcggccagcaccgtttgttcgtctttgatttcaatcagccggcagagggcggtttttactttcgtttcatccgttctcttaaaaacgcgctcgaccttgtaggaaacccggtggccggattgaagcgcgaatgtaaatgagacggcaagctgatcttcggcatgattcagaatgccgtgcgtattatttgcggcgcgctccacttttccgtataaagcgagtgtcatggcatcaaggatcgacgattttccgcttccggtcggcccgaaaatcccgaacaccccggctcctgacagtccggcaaaatcaatggtctgttcctccctgaagctgtggagcccttttatcgttaacagaatcggcttcatgtcgcatcctcctcatcatctgctgacgcaagctctaaaaacagcttgaccatctcctcatccggcacgccgccgcccgtttgtttttcataaaacttcttaaatcgatcctcaattgatgtgtgtttcacttcaatccggtcattttcggtctctttttcttcaaaaaccggcctgatatggataaagccgggatgcgcctttctcagccgatgaatttcctcgagagaaagctgatccgtcaaatggatatcaagatcgatccaggcattccggtcacgcccttcatcaagccagccgtgaacctcgctcagcccctgcgctttccatttgacgagcggtttaccggaagacaggaaaatctcttcccacttcgcttctccgccgggcttcgcttctaccactgtcaccgatttggcataaccggcttccgaaaagctgtatgcgagcggagagcctgaataacgggcagccgtcttggcgcgcttgatcgtttgcggacggtggagatggccgagagccacgtaagccgcatcagccggcaggctgtcagcggcgaccgtgtaggcgcccccgacttcaatcggacgctctgaatcggtctgatttccccccgcgacataaatgtggctcgccgcgattttcacggcatcgttccggcacagtccgcacatgtgagcaaacgcctctctgattttcacatcgtaatgatcgcgaagaagcttttcctcaaacgtatcagaaagcacttcgtttaatctcgcctctgacggatatgccagcgcggctacggctaacagctcgtccgccgacggcacctcaatatggacgggttctgtccgcggatagccgattaaatgaatgccgcgctcatttgttaacggagaagccgccgccagcctgtcgggattgtcatggtttccggcaatgacgacaaccgggcgttttccgccgtcagaaagcgcggaaagactttcgtaatacaattgttcagcgagcgcaggcgggttgaccgtatcgaatacatcccccgccataatgaccgcatcaatgttttcttccttgacaatggtattcagctcttccagtacttcggcctgctcgctcagccggcttctgccttccagcgttttgccgaggtgccagtcagctgtatgtaaaatgcgcataccgcattcacctcactttttgatagaaaaaaagatccgctccaaaaaggagcttcggatctcgttacagtgtaagaacgtgacctccatcgaagaaatagagcgcacgccctttcactttcgtttttgtaatttgttcaaccgcttttgtatacaattcgatttgtgtttcatatcttttttgcagaatcggagccgcgccttcaaatccattccggaatttcccctctatccgatctgttttatagtccagcaaatagagaccgtccgcagtttcgtagaggcagtcaataatcccttgcacgagcagcggttcaccggccgtttcggcatccttgtacacctcgccggccggaagcgccatactgaacggcacttcccggtcaatccgcagcgccccgagaaggtctttaccgatttcagttccgaaaaaccggacaatttcttctatatcaatggcttcctgctgctcttctgtcagcagctctttttcgtaaagcatccggaccgtccgctctgcttcttcggcagtcggaatgtgcgtcagcggtatgtgctgcatcaccgtatgcatcgccgtccctttttcggcggctgtcagcccttttttcatcataaaaccgggacgcctgtataaaagcgtgtctcctgacggtttgatgagagagcggccgctgtattcatcctcgtactcttgctttctcttcagctcagaaactgactgcttcgttctgatagccgtcagctctcggtacggatattcccatttaagcagacggcgcgcctgatcatcaaatgaaaacgaaccaggaatcggctcgccctgctgtatcgccttgagacgtttgctcttttcttcagcacgttcttttggattctcttccagcaattcactttgctgcagcatccggatgtgaaaacgcgacgggtcgcgcgcgatatcctcagacgaagaaagtcccggcgtcctgtgcgcctccatgtcacggtggcggatgagcgccggcccgataaagtccaaataagatgacgcctgatagcggtcgaattcagaaagaagccaatcagcccggtctgcttgggcctgccatttggccagctgtttttcccggtttttgcaggaaccgacgagaaacagcttttccttcgctctggtcagcgccacatacaatacgcgcaattcttcggataagagctctctgcgcatctttttcttcatcgccacaagcggaagagtcggatagctgattctgagttccggatgaatatacttcgtgccgaaaccgagctctttatcaagcaggtatgatttgttgagatccatcatattaaaacttctgccgagtccagcggtgaaaacgacgggaaattcaagtcctttgctgctgtggatcgtcatcagccgaacgacatcctcctgctcgctgagcgcacgggcggtccccagatcatcgccgcgctcctgcatccgttcaataaaccgcaaaaagcggaataacccgcggaacgccgtcgcttcgtacgagcgcgcccggtcatacaagacgcgcagattggcctggcgctgctttccgccgggcatgccgcctgcatagtcaaaatatccggtatcgcggtatacttcccaaatcagctcagacaccgaatgattcgtcgaaaatgaccgccacttttgcagactgtcataaaaggttctcagtttttgatacagttcatcatgcctgtcaccgttcgctatatatgctttcagcgcttcataaaacggcgcttttttcttttcaaggcgtatcagcgcaagttcattttcgtcacagccgacgatgggcgagcgcagcacggaagcaagcggaatatcctgatacggattatcaatcaccttcaagactgaaagcgccgcagccacctccacggcttcaaagtaacccgacgtcaaattggcgtacaccggaatgccctggtttttcagctcttccattaattgcggcgcccacggcatggagcgcagcaaaatcacgatatcccggtactggatattccggtgtgtttttgttttcccgtcatagaccttaaacggagacgagacaagctttcggatctccccggctatcgctttcgcttcccaatgcacggtttcaaagtcttcggcatcctcggagctgtctgcgtcatcagcgctgtcaatcagcagcagttccgtttttgccgcgtcattcggcggatacgatgcgccgagcttcaatgccgcctgttcatcgtagtccacttcgccgatttttccgcccatcagctgcttaaacaagaaattcgtactgtccaaaatatcggaacggctgcggaaattttggttcaggtcaattttctgccccgcgccttccccgctttctgtaaaccttttatatttcccgagaaacagcagcggctcagcaagtctgaaacggtagatcgattgtttaacgtcgcctaccataaacagatttcccgcctcttcatccccgcttttcacaagctgcaggatagactcctgcacaagattggtatcttgatattcatcaaccagaacttcatgaaactggtcttgataataaacggccgcttcgctcggcacccgccggccttcttcatcaaccgcagttagaatcgccaggcagtaatgttccaaatctgagaaatcaataattgatttttcttgtttcgccgcttcaaatcgttttccgtacgatatcacgagctgaacgagcgtttcgatgacaggcttcatatctgttaaactcttcaagtgatcttgcggacttcttgtaaagtaatcggtctttaacttttcgatcagtttcttcgcgccgtttcgcaaatcggtcgcttcgtccaaaagcgctttgtcaaattcatcaccctttaccggcttcgcccgcttaaatgagactgcggggacccgttcatacagcgcatcgaagtcatgccggcagctgatcagctcttctatctgctgaaggtcatccagaaaattaccagcgcgcggggccggcccgccgggcgcttttgtcagttcaagcgccttctcaagcttttgttttgccccgaagagcgccatttccgcatcttctctcacatactggtaaaacggaagctcttccattttgctttcttccgtcacgtcatacaagcggacaaagctctgcagccacgcttccgggtcaggatgcgaccgggaatactcgtacacccgtttgacaaggtcttgaagatccagatcatgcctgtctgtcgtatatctgtctgcaagctcaaaaaacgcctgattcccttttgcgtattcatcttcaaacagctcatcaagcacttcgtctccgagcaattcgccttccgtctggtcagccatgcgaaaaccggggtcaagatcaatcatataataatattttttaagcacttgcagacagaaagagtgaagcgtcgaaatgctcgcccgatttaatagagagagctgccgtctgatatgcagagatcccggatttttggcgagctctttttctaatgcttcagcgatccgatgcttcatctccgctgctgaggcgtttgtaaaggtcaccacaaggagcctgtcaacatcaacaggatcttcctccgcggttatctttctgatcatccgttccacgagcacggccgttttacctgatccggctgcggcagcgacaagaatatcgcggccggaagaaacgatggcgctccattggtcatccgtccatatgctgtctttcggtttaggaatttgcatcatcatccgcctcctttttcagccaatccagtatggtgccgtctttttccgctttcaggctgcggtattcattttccttaagcgactcatcaaactggcaaaccgatttaaacgcacagtacgtacaaggcgtcttatctttcagcttatacggggtaatggacacaagcccgtccgttatcgcttcgcccgcctgttcaaatgtccgccgcacgtggtctgtcagcagatgaaagtcctgttcgctgaccgccgctgagtcggatcttaaagacccgtcctttttcaaaccggcattgacgatatttgaacgcccttcctccaaagtcgtgtccatcaggctgatcgcctcccggtcaccgaggagaaggcctttcattttaaatttcttgaaaatttcctgctcgatttcatcaagccccatcggcagactggcctgaatcatcggatcatggatatggaaatacaaaacgcctgccggggtcgctttcatgccgagccaatccgcagaatgtgtaatcgataagtcaagatatgtgagcatttgcagagcgagcccgtaatacacctcagccagatcaagccccctgtcgcttgatttataatcaacgattctcagcagcaggccttttgaactttccgctttatccacgcggtcgatccgtccgacgagttccatcgtacagccgtttttcagcgtgaaagtgagcggaggcagcggtccgcttccgccgaaaccgagttcaagaccgaccgggacgaaaccgctcgccttcgcatgctcgcttaatatgccagaaacacgcgtgacgatcttctgcagtttttccttcacgtaaaagtgtctgtttgagctgagcagaatctctttttgcagctttggcgcaagccgttccaccgcttcataggagaaattccggcactgatctttcgtcagatcgcgccattccagcttctgctcacgaagccggtctgaaatcagcttcagactggagtgaaacagctggccgatatccggcgcttccagcttgaaaaactgccgctcttttaattgcagcccgtgagatgcaaaatgagaaaactggcaggcattaaacgcctccatccgggaaacgcttcctttaatatgctcgccgtaaagctggcgcgaaacaggccgttcaagacgcttcgcctcattgcggaaaaataggcttgaaaacagctttttcgcacgctggtgatcagactctttcatcagcacattgtatgcgctccaccatacgtcactgatctcgtactctcttgtccacagcctgagctgacttgccgtatacgtctgagccacctgtttattgacgagatactgaagctgctcttcttcgcttacctgctcgggatcagccgctgacagcttttcctgatgatcgggaaacagctcgccaagcctgtttacaacgattgacggcaggagcgtttttccttccgcatcggcaatcgggtatgacacataaagacggtcagacggactcgacagcgccatatagatgagaaaatgctcatcaagcagccgctcacgccccgcggaagacagctccactccgaccgctttcagccactcccggtcatcatcagacagcacgccgttttcatccgggcgcgccggaagaacgccgtcattggccccgatgacgaatgtgcaggacgtgccgtatattcttgagagatccatattccctacaaatacttggtcaagcgcaggaggaattaaagaaaaatgaagcgattccgttcccgtttcaagcatttgctggaacagcgccaaagatatttcatcttcacccatcatgccggcaaactcctcgagaagctggataacggcatcccacgcctggccgtgctgctgcgcttcgatcatgtttccggcctcttcggcccgctgccttttccggtccagcttcaggggaacatcggtatcttccaaaaagagataaagagcctccgccatgctttgaaccgttttcgcttttttcatccggttctgcagccggataaggggtgcagctatccactctctcgtctcattcagcatgtgttccatctcgatttcctgatccgtctgcgcgaaatcctcatcgagcgatacgaagcgcctgtatacaaaccgctcgccgttcgtccagcgctcccctttaatgccgtaggcgatacagtaattttcaagctgatctacctgctctcttattttctgctccggctgatcaagcgggaataacagttcggttttcgcacagcggaacaccgcttcatatctccagttccccttcacgacatccaggcttgaacggatgaattcaataagcgggtgatgctgcatagaagcttttccgtcaataaaataaggaagcccgtaatcggcaaacacttccttcagcaaatctttataatcttccggctgacggatgagaatcgccatatctttgtaccggtatcctccgtcccggacaagcgattgaatttcccgggcaataccttcgagctcagctcttctgttttgcgcctgcatgacggtaaaagcttcctgtccgccggtatacgcggcggcgggacgcacatcgtactgcgactctatacaggcaagctccggcacatgccgatgccgcttcgtgccatgcagttccttgcaggaaatatcggcattcaattcctttgccgtctgataaagcttatagtatgtgcttcccgtcattctgaacagatcgagctcatccggtgcctgttccgccgaagggctgtccgccgtcagcgagaatgtgacatgttcagcatgcatgatcagctgctccagcacccttaattcctgcggcgtaaattgatagaatccgtcgacgtaaacacgggcgccttttacaacgtccgccaaaggaatctgctgagcgagcagcgtcaaatagtcctccgaatgcagatagtgtccggcgaggcttctttccatctgctgatataaaatgcctaagtcatgaagtttttcagacagcatccgctctccgcgatactctgacgccgttccgctttccgccatgcggcggacgtcttcaggctcaatacagtatcgcttaaactctgtcagcatccgttccacctgctcagtgaatccggctttgtcactcgctttttgatacactttaaaatcgtgcttatgttcttcaatcagtttccttaaaagcatctgcacacccgtcgtcgtcacaaacggacggttcatgcccccggtatgctgaagcacgcgccacgccaaacgcgaaaaactgaacacttgagcgcgtatcatgcctccgatatccggcgttttagcaagctcatattccattaaaaacgtcatttgatccgggactagaaaaatgatcggtttcccgaacggctcccggcgcagttcatcttgaatgctgtcgataatcagcctcgttttcccactccccgatctgcctactaaaaactcaacacccaaattagaagacccctctctttttatctttctacattttatcgaaagttgacgaaaatgaccaatctcatctgctggtaaaaacgggatgactgttttaaaacatatcgtttttgaccaaattaaagaaaaaaaggattaaatatgatgtcagaatatcccgaagtgattgtgcgaacgattctgtcgttcagcattctgtttatcggcgcccgtatactcggaaaacaaaccatttcacagatgacgctttttgatttcattgcggccatctcgctcggcgccatcacagccaatctgtcgtttaatacaaaactgccgattcattttactgtcagtgcttacacgatttttgtggttatcatttatcttgtcgcatatctttctatgaaaaacagaactgccaggggtttctttgcaggcaaaccgaccattatcattcaaaacggaaaaatacttgagcataatatgaaaaagatgcgctataccctcgactacttgaaccagcagcttcgtgaaaatgatgtatttgacatttctcaggttcagactgccatcattgaaacaaacggcagcatgtcagtggaggtcaaaccggaatttgcgcccgttacaagacaggatctcggcatctttgccggacatgaaaagaactttgccgttgagctgattatggacggccggctggtaatgaaaaatctggaagaaaaccacgtatcggaaaaatggctgagagaagaattggataagagaaacctcaaaccggaagacgtcgtatacgctgtgcgcggaagcaacggccggctttttgtcgacacatacgacgaccatattacatcgccgctggatcaagaataaaaatgacatccgcacatgtcacgggctgccgccgtataataccctataaacatccgggggtgagtccaatgcacgagaatttttttcattatacagccatctgcagtgacgattctgtgcttataaaggatctggtaaaatccataaacggtgaatacagcgctgtgatttgctactcaatattagccgaaaaagcgccgaccgcagaaatcagaagacgaatcgaacatatcagagaggaagaagtgcgccacatgcacgctttctcttcactgtatacgtcaattaccggaaaacagttgacgccgaaacagacggagcattgtccgcacacatacagagaaggactgagggcggcgttttatgatgagcagaaaacgaatgatttttatttacaggcatccgatagagcggtgcatccggaagcgaaacggttatttgcccgcacggcatttgacgagcagcgtcatgccgtctggtttttatacgatatggcccactctcctttccaccatacagggggaacggtatcaaactcgccgaacacaagctacaccgaggtaaataccggaaaataacgattcagacgctccccgctgggagtcatagacggcaaaccccgttctttcaacaggagagaatggggtttatttttcgagccgtttttatacttccactaaacaatggataacttcttcattgtatagtcagcaaaaaccctttataataaaataaaccaactggtcggttttaaacgaaccgagccccgctttgccgggacaacgatatgaatgaggcggaaaggatctgtgtgaagtgacaaatacaaaaggcggtgccggaaagagcgaaaagacgaagaacaggctcgtatccgcttcgcgtgacttatttgcaaaaaaaggatattcagaaacatcgattcgggatattttagaggcggccgagatcagtaaaggcaatctttatcaccattttaaaggaaaagagtttctgtttcttcatatcatggaagaggatcaccgcgtgatgatcgagacgtggagggaaatggaagctgatctgaaagatgctgccgaaaagctgacgggctttgcggagctgctcagccggatgagcatcaattacccgcttatgagagcaagtgaagagttttatgcgagtgcgtttacgtcagaggaggtcgtaaagcggctcaacaaaattgatattgaatatgacgatgtgatgagagagatcttagaagaaggaaatcaagacggaagctggtccattcatcatgtcgaatcaaaagtaaaaatcctgctatccgtcttctacggtttagatgtgttatataaaaacgataccattcagcaaagaatcgaattgcaaaaagaagccatctccgtgtttattcacgggtcgatcaacgctgataaactgaatgacagctgacaaaggagaaacaacatgcaaaaaccgatcagagaacaaaaggctgtactcatcatcttattaagcaacatatttattgcgtttttaggcatcggattgatcattcccgttatgccgctgtttatgaatgtgatgcacttgacgggcagcacaatgggataccttgtcgctgccttcgccgtcgcgcaattaattgcatctcccattgcggggagatgggttgaccgtttcggcagaaaaatcatgattctcgccggactgtttttgttcgcattatccgagctgaccttcggattgggcacacatgtctccattttatatttcgcaagggtgctggggggcatcagtgccgcttttatcatgcccgccgttacagcgtatgtcgcagatattacgacggtgcaggaaagatcgaaggcgatgggctatgtatctgccgccatcagcacagggtttatcatcgggcccggcataggaggatttattgccgatcacggcgttcgtatgccgtttttctttgcggcgggaattgcatttatcgcagtgatttcctctgtctttatgctgaaagagccgttaactaaagaagaacgcgcaaagcagatggaaagcgccaaagaatcaaccttcttaaaagatttgaaaaagtcgattcatccaagctacttgatcgcctttatcatcgtttttgttttggcattcgggctgtcggcgtacgaaacggtattcagcttatttacaaaccataaattcggcttcacgccaaaggatatcgccattattattacgttcagctccattgtggcagtcctcattcaagtgctcgcgttcggcagacttgtcaacttcctcggggagaaaaaagtcattcagctttgtctgatcatcggcgctgtgctggctttcgtttctacggtgatgtcagggtttttgcccgtgctcgctgtcacctgcatcattttccttgcgtttgatttactgcgcccggcactgactacttatctatcgaagatcgcaggaaatcagcaggggtttgttgccggtatgaactcaacatacacgagtttgggcaccattttcggcccggctctgggcggtattttatttgatatgaatattcacttcccgtttctgttcgcaggtgtggttttatttctcggtctgggattgacgcttgtgtggaaaggaaaagcgggcgaggtttcggagtagggtgcactcacccatctccggagctttttttatgttttcgataagaaaaatgaatggattatgagaaataattcattatttatttatctcaaaatctatactatagtaatagtaaggttaacgagcttaacaatttaatatgaatgtttcaggaagaagggttttcattgaagaaagacaaacatctccttacggatatctggtttattctcatcagtgcggcagggggtttcttctttcgcttacagggatgtcgatcgcctggatgctcggaacgcttgccgccggctgcatcctctccatgacgaggcccggctggctgttcatggcgcctgacagaagagggattcaccgcagatggcttgcggcgggacaaatgatcctcggcatcgaactcggccagaaattgaacctgtccgttctgtcggttttacgggagcattggcttccggtaggcttcatgctgattttctctatcgtgatggcgcttgtttccggatatgtgctctttcggttcagccggacggacatgatgacaagctttgtaggaacggcgccgggcggtttatccgccatgccgggtatcgcccaggaagtcggcgcaaacaccgcgattgtaagccttattcagctgacgcgcgtccttttggtcgtcatgacaataccgtttctcgtcattttcttatttaccaaacaaaacggtgcggctcagacatcagccggagccgtttcagcaggagcttcacatccgggccttattcccgtcttgttaacggccggatttattttagctgcctggcttgcaagtaaaggcgcaaaacggctgaaattccccgccccttggctgctcggcagcatgatcggcgttgctgctgcggaaatcggcgtgtccgccttggcgggcaaagacatgctggcctggtggccgccggaagcgaaccagctgtcacaaatttttctcggcgccacaatcggatcaaaaatgtacaaaagcatgttcaccggtgtgacgagagtgctgaccgtcggatttatttcttccgtcggattaatcgccgccatgattctgagcgcggttgcggtttctaaattaacgggcatctccatgattacatctgttctcgccttttctcccggcgggatcgccgagatggcggcgacttcgatcaccctgcacgaagactcgactttcgtcgtcgcggttcaggtcatccggatcgttctcgtcatcgccatgcttccgcccttctatcggctgctgcaccacctttctcagctgaaacgggcacacggcgaaagaggccgggcagaaagaggaacatgatccgaataaaaaaacacgcatccatatgcgtgttttttatttgaacagctctccgccgccatttacagaccgccagtttgctgacagatcacggaacagccgttcagcaaataacagttcttcatctgtatagcggtctaaaaacgccaagagccgctgttttatcaattcatgatattcatgatgaagggaatgcagctctttcccggcaggagtcagccggaaatagacttcttttttattgtcactcagccgggttctgcgcagaaagccggcttccaaaaacttcgcgcagcttctcgacacggtcggctttgtcgtcttcattttttccgctattgacgtgacattgatcggttcatgatctccgatacacgacaaaatgtgaatttccgtcaaggtcaattgtaattttttcccgtttccttcgcggagttcatccatccgtccggccaacgacgccctgatatcctcctgacacctctcctgctcgtgaaaaatatcggtcagcccttcaagaatcatgtgttttgcatggtctggctgtcttctgtccaactgctgagtcacccttccgtattgattgtttcttttactataacgttttgttacataagaaacaatcacacaggcgcataaaaaggttatcagatgaataatccccatctctccaaaccggccagaacggcttcttccgcttcacgtcccgagccgccggctgcccatgccgcatggccgtccggccggattaaaacggtgtggacgtcattccaatcggcacgtgtttcagcaagctccgccctgactgccgccacgctgtccgtatcaataccggcgggaatgctccctcttaatgacagaagcacaaagccgcccttgcggagaaaatcatacagccgggccggccgcccgtcatgaagggtcagttcgatatccggcaggcgttttccgttcagggtatgcggcggcagctccgcatccggttcataatgcagatcaagcgcggatacttttcccgccaataaacggttggactcctgaaaatccagcaaagcggtcatcgtttctcttaatgccatccccgactcggtaaaatccatgagctttatctgcgttttgatattgtgcagcacttcttttcctgtgctgtgcctttcctgatgatagctgtccagaagatgaggcgccgcttttcccttcatttgcgccgccagcttccagccgagattgacggcatcctgaagccccgtattcaggccttggccgcctgcgggaaaatgaatgtgcgccgcatccccggccacaaaaatccggccggagcggtactgctcagcctgacgctcggcattgccgaaccgcgacatccataccggatcactcaatccgaaatcagtgccgcatatccgccgcaggtcttctttcagctcatcttcggtgacccgctcttccttccgcttttgcgggacatgcggagaaacgatgaggacacggaaaagtccgtccgtaagagggataatcacaaccgatccctccagccggcacgttgaaaaaaaggaagattcgggcggatgtttcaaagcggcatcacaaagggttcctgttaagtcggcatcagtgcccgaaaaagcgatgcccgcctgtttccggacaatgctccccgctccgtctgtacccgcggcatataagctgtgaagagtgcggattccgctttcgtcccggaacaccgtctccactccgtcatccgtctgggtgacagccaccgcttccgccccgcggatgatgtctgcgccgagacttgatgcatactcctccaacatccgctccgtttctgcctgtggcagcattaacgaataattctgcttcgtatccagccgagaaaaatccagccgtgtatccagcatggaaaaatggccggaagacaccttcgtccctttttccaagaagcgttccaatatgcctctcatggcaaaaagctcaagtgtgcgcggatgcatgataagcgctttggaatacggcatcgtcttcttcaatcgttcaatgacagtcgttttcactccggccagcgccagttctgatgcaagcataagcccgaccggacctcccccgataatggcagcctgtgttttcatttcatcagccctctttcatatttttgttgcgcgcgtaacaaaaatatgaaaaataaaacacctccttttttgtttcgcgcgtaacaattttcattatagtctttcctccgctttttgacaatcatttccgaaaaaaagacgccgttcacttggcgtctgattcactgatgactccgacaatgtctttatccttaatcggaccgaaatgacggctgtcgaggctgtatatgcggttgtcgccaataacaaagtattgtcccttcggtatgcttttgcgcccggtcgtttccttcagcgtataatcaccagtcacatggctcccggcggacaatgatgactttaacggttttaaaaacggttccgccacccgttttccattcacatacagctgatcctccctgtatgcgattgactcgccggggagcccgatgacacgtttgatcagcactttgcggtgcgggcctttaaacagaacaatatcgaaacggcggatcgttttgtaacgatgggaaaacttgttgaccatcagctcatttccttgtttaaaggtcggattcatgctgattccttcgactttataatcaataaaaatggcattctttaattgtatggccaaaacaacgataagcacgccggctataaaccaaaatcgttttttcaagattcctgtctccctccgtctttctcatgctgactgattctcgtctgtaaacgccgttcgatatgctttccggcataccacagcaccgcgatcaccattatggcgcccgccatcctgaaaggctgtgtaatgagtgcgtgaagatcatacccgataaaactgatcataaagatcataaccattttccccatcgcggctgctgatataaactgcagcgcccccacccgtgacagaccggcaacgatatgaaccgcagcggacggcgtaaaggggaagcaaagtaaaataaacagcggaccgaaaccgtgccgctcaacccagagcatcatccgccttatggtctgatgcctgcggatgaaaccgaaagctcttttctgtccgaaacggcggacggcataaaacatcagcatcgatcctgacgcagacccgagccatgacagaaaaaaaccttcccacaaaccaaatgcattcgtattcgccaccacaaatacaacgagcggcaaaaacggaagaaacgcttcaataaaaggcaatacagccgcagccgccgggccgaaagctctatagctttggaaccattccgtcagctgttcctcagtcaaatatgataaaaaatgctccaacgtttatactccttaacgagtttgtctatccttattctacacattatctccaaaaaacgaaaatgtttacgagattttccgtcttgaaatatcgtgtaagcgagtataaaataagaacaaacgttctcttttttaagaaagaaggagtatttatgcctgacattcggagcggcacccgcgatctcatcgaaaaagggctgtttctgcccatggcggccgccatcctgaaccgggacctcgaagcgcttgattcgtgcccgttcaaattaaaacaaccctataaacagcttatcagctgctctttaaaattagcacaaaaggatttgagtgatgttcgaaaagagttaagaaagcgtaaaattaaaatatacgaagcggaaagagacgaagcatttacgctttatatatgcaccattaacggctatgaagaaaaacaccgttatttcaacccgagaatacgggaacaggtcaccgccttattggaatattacctgtctcttgcgaccatttaaaaagcagccgggcctgcttttccttttcaaaaaataaaattcagactattcacactatacattcgacatgattttctttataatcgggacacgctgttttcaatgaaaaggaggaatgttatgaaactgattcatgttctcgccgccctgccctttttcggaattctcgccggcattccatttgccaaccgggtgacgccttatgttttcggaatgcctttcattctcgcatatgtcgtcatctgggcggtgctgacttccgttctgatggccgccgtttacaaattggacaaagaaaacaaggcgggtgagacggaatgaatgcagcatttcccgtaatggccgccgtgctcctgttttgtgtatatctcggaatccgggcccgaaaaggaaaacatatggaccttgaacaatggacggtgggcggacgcggcttcggcacgatgtttgtctttttattaatggcgggagaaatatacacgacctttacattcctcggcggaagcggatgggcttacggaaaaggaggccccgccttttatattatcgcgtacggctgccttgcctacattttgtcatattggcttctgccagccgtgtggacttacgccaaacaacacaaactgatgtcgcaatcagattttttcatttcaaaatacaacagcccgctcctcggcattctcgtatcgctcgtcggcatcgcatccctcatcccctatctcgtcctgcagctgaaagggctcggattaattgtttcagcaacgtcatacggacagattccgccctccgccgctgtctggatcggcgctgtctccatcacgatttatgtgatgatttcaggaatccacggttcagcgtggatatccgtcgtcaaagatatcatgattttaggcatcgtcctgtatttaggtatttatctgcccattcattattacggcgggtttacggagatgttcaaacaaattgacgccgcaaaacccggttttctcacgctgccggaaaccggacagagcgtttcctggttcagctcaacggttttgctgaccgccctcggcttttatatgtggcctcatacctttgccgcttcctattcggcggagcatccgcgggtgtttcggaaaaacgcgatcatcatgcctctttatcagctcgtcctgctgtttgtcatctttaccggatttgcggcgattctgcaggtgcccggtttaaaaggggcggacacggatctcgccttattaaagctgtctgtgaaaacctttgatccctggtttgtcgggctgatcggatcggcgggcatcctgacggcgcttgtacccggttcaatgatattaatggcctcaagcacgctgttcgccaaaaatgtgtacaaagccattctgcccggcacgactgacgaaaaagtctcacggctcgcaaaatacgccgtacccgttatcgcgctgatttccgtatattttacgctgaaaggcggaaataccatcgtcaccttgcttttaatgggctacagccttgtcacccagcttttccccgccctcttattcagcctgccgaagcggcgtttcatcacaagccacggcgcttttgccggcataacggccggggtcggaacagtggccttcattacgctgaccgaatcaaccgtcggaaccctctttccgtttcttccgcagatcattaaggatatgaatacaggcatcatcgcgctggttctgaacattgccgtcatgtttgccgtcagcgccgcagtcagaaaaaaacaaatcagcgcagccgaaaaggcggcttaatgataaaatagcggtaagacacatgaagggggaaagccgcatgatcatgacaacgaccgaaaccgtcgccggaaaacagattacggaagtaaaaggcttggtgacaagcagtatcgtccagtcccgtcacatcggaaaagatttgcttgcaggcttaaaatctgtcgtcggcggcgaattgaaaagctataccgaaatgctggaagactccaaaaaagcggtgaaagagcggctgatcagagaggcggagcagctcggagcgaacgccatcgtcggcctgcggttcgaactgaccgcaggacagaacacatccgaattaatcggatacggaaccgccgtcaccgccgaatccatttaaaaaaacaagcctctttagagaggcttgtttttttatttctcacatgcgatatagtctttatcccggtcaagtcttttatttgcattataaagcgcttttgatacatacggcttgtactttgttctgccgcccttgtttttcactttcgacgatttggccacgccgcccttatacaccttattcagcgccttacagttttgatacgtttttacctttgttttcgcttctgccgtctgccccgctccgtatgaacaaccgaacaccaggccgaaagacaaaagcacagctgccgtctttttcatttctatcctatcccctttcctgaatcatgttgtatgactgaacatatcatagttcaaataatctccatttacaagataaataggaaaatagttttaatttacgtccgcccgtatatcttttatggaatttttcccaaaaccttttataatatgaattgatagcgctatctgactatgatgataggaggagaaatgatgatgaaaaaagggcttgttgcgggtgttctcactacagccgttctattcggcgcatgtacggcggatattccgggggtgatcagtcccaatacggcggaagcggcgtcccagctcagtaaaggaatcggcggaagggcctatctgaacagcacgggctcagttctcgtcacgaaaattcagcttccaagctcgattcaggtgtcaaatgggacagcctatatttactcaggatttaccggaggcacagaggctgatatcgggcttcagtacagtgacacctatcatgtatggaaaccgatcatgaaagtcggttcaaagggacaaggccaggtccggtatctggaaggagaaagccaattcacttatacgaaaggcttccggcccggcagcaccgtacagctgaccatttacaaaaatctgaacggcaatacccgcgccacatattggggcacgaataatgacggatacaccggccgcatcatctcagaactcgcccaaaccaatgtaggctctgtctcaaaatggaaagcgctcgccaccgtcgcggtcacatcagaggatcagcgcccttacatcaaatcaaacttctcgacagcctttacgaacatcacgatcgacaataaagcagtcacacctgtgattgatacacaggattttgccaaattgacagtgtcaggcagcaccgtcagcatgtctgtcgtcaaataaagaattttgaacgcacgatttctttcatcgtgcgtttcgtaagggtctgccggatacgcaaatcccttatttttcggattacgtttaataaaaaaacagccctcctcagggttgtttttttaacatttctttcattatttccgccaaaacgctgagcagtccgccttatccttgatattaaattgaatcatgcgttcaagcagctcataatacaccggttcagtccattgaattctgaacaaacgggaagtagcgctgtagccggcacgggcaatgtcgtcggcaaaatgcgcaattccagcttcttcgggagaaacacttacatgatgctttgctgccgcaaagccgataataaaggtgccgtgatcggtaaacatcggcgtgttccacttgatctgcggtgttaaacccgggaattgctcagacgtccacgacaggatttcctccattcgcagacgatggtcagggctgtcgatacttgataaatagtctttgaaaacgtccatgtcttcctccttcaacatcacgtccgctaacgccaaaaccccggattttcagctttttctttgatgttaaattcgatgatcttcttaagcagatcatagtgcaccggatcagtccaccgaattctgaacaggcgtgaagaagcgctgtacccggcttgggcgatgtcatcggcaaaatgctccatcgtctctttttcaggtaaaatgctcaaatgattttttgccgcggcaaacataatgatataggtgccgtgatcggtaaatgtcggtttgttccacttgatctgcgcttctaagttcggaaattggtcagccgtccacgacaaaatttcctctgctttgagacggtgatccgggttatcgatttctgatacatattttgcaaacacatccatgcccatctctcctaaaatgaaatatcattactctttacatcatcatagccaacagacggacacgatacaactctatccgggcatgtaaatcgaaaaagcccttcccaaaaggaaagggcccgtccctttacatcacagctttctctaatatctctcccccagctcccgcaaaataaagtcgtagatcattcttgtccgctcttctttcggatacagcatgaattcctgccgcttcgggatatgactgcccatcctgtcctgaaaagtggttctgagataggcggttctgtaaacctgattttcaaaagaatgataggatacttccagttccatcgttttgccgtttgagaacgtgaccgctgtgtcatcaaatgccgtcggttgaaaatctttaacgtgcacatgagatatccagccgcattgaggccttgcagaagaaagtgtagggaataaaaagatgtgatttgaagggtccaccataatcggcggcttgtgagaaattttaatcgcttcatatgttcccgcttttctcccggcatagctggagccaaagtagcggcagcttctgtcgatgatgtgaatcggcttcatgctgacatacagaatgcagtctttttcaatgaccttcgaccccattttaccgtctatttcctcaggcaaaacagcgatggttgaacgatttacttcgtagctttctaagggtgcgtgtgttttctggcacatgatgtgcagcctccaatccttttcttgaaaatttatactaataatctatcatctgtaattggaaaacgacaggttttttttgaatatagctaaaaatcaccttttaaagctgtaatttagtcttaaattactatttaaatattatttttctttttcatttcacctcatttatacaatgatcattttcgttttttcgtcaatttgcaggatatgtcgatatatttccaagtattagttatctaaagattataaaaattaattgatttttccggccgttatccatatactataaaaaaggcattggggggattctttatgaaagagaaaaagtcgtacactgagctcatgaagtcccgcaacacggaaaaagcaaacgaattcgatgtgacaatggccgatatttacattcaaatggtgcttgatgaatccttgtataaacgccggatcgccatgctgacaatgcagattaataaggcgcttgatgataaaaataaagaagcgttcctcacgctttcaaaagaatatgccgctctcaaacagagtgaataagccaatccatatggattggctttttttacattatccgtttacgatggtgccgccgttcacatgaatcgtctgtcccgtgacataggaagaatcatcgcttgctaagtacaaatagctcggcgccacttcaacaggctctcccgggcgctgcatcggcacgtctgagccgaagacttccacttccttcgccgagaagctcgccgggatcagcggcgtccagatcggccccggcgccactgcgtttaccctgatgccctgagtgacaagagattgggaaagagatcttgtaaacgtgacgatcgccccttttgtcgctgaatagtcaatcaatgttttgtggcctttataggcggtaatggaggccgtattaatgattgaacttcctcttttcaggtgagggagcgcggctttcgtcaagtaaaacattgaaaaaatattcgtctgaaacgttctgatgagctggtggctcgtgattttctcaatccccggctgcacgtgctgctcacccgcgttgttgaccaggatgtcaatggaaggaaaggcttggcccgcctggcggatgacatcgttgcaaaaggcttcgtcgccgacatcccctgcgatcagcagacacttcgccccttctttttctacatattgcttcgtctcttcggcatcctgatgctcatcaaagtaaacgatgaccacattagcgccttcctttgcgaataaaacggatacggcgcggccgatcccgctgtctccgcccgtgatgatcgccgttttcccttcaagttttttcgccgctttcggtttgtcaaaaacggggcgcgggtccattacatattcaaagcccggctgccggttttgatgctgcggcggcaaggttttcttcttctgattcgccattttgatcactcctttacattaattactatattatgagtaatttgagcatcttatacgaatttcatgtatgaacagagtcttattggaaaaattaagaatatacaacagaggaggtaaatctgaattgactactttttcaaacgaggaaccggcttcctattggaaagcaacagctgacattccttcctttcccgccctcactgaagatacggaatgtgacgttgcggtgatcggcggaggaattacgggcctgacaacggcatacgaactgacgaaaagaggtttccgtgtcgctgtcattgaagcagaccggattttaaacgggacgaccgcgggcacgaccgcaaaaatcaccgcccagcatgatttcatctatgccgatcttattcagcagatcggcctgaccagcgcaaggctgtatttcgaagcccatctccgcgccatggaagacatgaagcagatcatcaaggacctttcgattgactgcagactgattgaacaagacgcatatctttacaccaatacagaatcaggcgtcaaaaaaatgcgcagtgagcaggaagcttataccaagctcggtattgaacacgagcttgtgaaagaacttcccgtccccgttgattgcaggctcggcctcgccatgaagaatcaggcgcaattccatccgcttttatatggtgcggcgctcgtcaaagagatcgttaaaaacggggcgcggatttttgaacagacggctgcgatcgacataaaaaaagaaccgcagccggaagtggtcacgaaaaacagacacggcatcaagtgcagctacattgtctgcgcttcccactttcctttttatgacggaggcgggctttatgccgccagaatgtatgccagcagatcctacgtactcgcggtaaaaccgaaacaagcgtatccggacgggatgtatctcagcatagacaagccgtccagatcactgcgatacaccgatttgaacggtgaaaaactggtgcttgtcggcggtgaaagccacaaaacaggccaaggaaaagaaatgtccgggcattacgaagcgctgaaacaatttgcggaagacacaatcggagttgaaagcatcccatatcattggtctgcacaagaccttgtcaccattgacaaaattccgttcatcggtccgatctcaggcgatgaagaacatattttggcggcgaccggttttaaaaaatggggcatgacaagctcagcgctcgccgcgaagcttttggctgatcatattcaaaacaaaaagaacccgttttccggcctgtttattccgtcacgcttccacgcagatcccggactgaaaaaactgatttcctataatgccgacgtggccaaacaccttatctcgggcaaacttgagaggccggacgcttcgcctgagagtcttgggcccggggagggaaaaatcgtaacggtaaacggcaaacgggccggcgcctataaagatgaaaaaggctgtctgcatcttgtcgatacgacatgcacccatttaggctgtgaggttgaatggaatgacggcgaacggacgtgggactgtccatgtcacgggtcccggttcacacccgacggcggggttgccgaaggtcccgccatcaagccgctgaaacgtctcacccaagattgactaaaccattctgtacgaatggttttatttttttccgcattaaaatatttttatcagattccttcattcaagttccttccaaaccgataaaaagaaaaagagaatatctgggggaactaatattgttatttaaaaaagaccgcaaaaaagaaacagcatatttttcagaagccgatggaaaaaaacgcatcgcgctttcaaatcaatatgcagatgtccaaaaacagctgaaaatggtcaggctcggaaacgaagaacttcatgtgcttgaagagctgcagccgttaattaaagaacatatctcaacaatcgtcgattccttttaccgaaacctggatcacgaaaaatcattaatgacgatcattaacgaccacagcacggtcgagcgcctgaaaaaaacattacggcgtcatatccatgagatgttcgccggcacaattgatgatgaattcattgaaaaaagacagcgcatcgcttccatccacttgcggatcggccttgaaccgaaatggtatatgggagcgtttcaggatctgcttctgtcgatgatgaacatatatgaagcaaccattccggatttgcatgagcttttaaaagcgatcaaagcgacgacgaaaatattgaatcttgaacagcagctcgtccttgaagcattccagactgaatataactgccagcgtgacgaacaagaggaaaagaaagcccgtcttcatcagaaaatccaggaaacatccggatcactcgctgatttgttttcagaaacgagcagagccgtgcaggagctggtcgataaatctgagggcatttccgaggcgtcaaaagccggcaccgtcacttccgtacatgtcgaagaaaaatcaatcggcgggaaaaaagagcttgaaagccagcagcagcagatgaataaaatcgacgccagccttctgcagattgaagaagaaatggacaagctgaatgacatcgcccagcagatcgaaaaaatcttcggcatcgtgacggggatcgccgagcaaacgaatctcctgtcactcaacgcttcaatagaatccgccagagccggagagcacggcaaagggttcgccgttgtcgcgacggaggtaaggaagctttcagaggatacgaaaaaaaccgtttccaccgtatcagagctcgtgaacaataccaatacacaaatcaacatcgtgtccaaacatattaaagatgtaaacggacttgtaagcgaaacgaaagaaaaaatgacgcagatcaaccgtctgtttgatgacatcgtccaaagcatgaaaacgagcaaagaccagacaggcaaaatcgacgttgatttgcaggcctttctcggcggccttcaagaagtcagccgcgccgtttcccacgttgcatcatccgttgattcacttgttatccttacagaagaataaagataaaccgaccggcctttttcataaagggccggtctttttaatgttaacttaaaatataatagagttgacatatataaagactcgctttattgtataaacatattttgataagctggaggaatacataatgaaattgacagaaatgatgcatattgccgtgtttaccgccattatgggacttttggggctgcttccgccgcttttcttatcctttacgccggttccgattacgctccagacgatcggtgtgctcttatcaggaagcatccttaaaccgaaagcggcatttttaagccaattgctttttttgctgattgtggcatgcggagcgcctctcctttcaggcggaagaggcgggttcggggtttttttcgggccgagcgccggatatctcatcgcatatccgctggcggcattactgctgagcctcagcatccaaggccttcgctcagctgctgtcccccatttgtttatcagacagttcttgttcggcgtgctgtttttgtatgtcatcggcattcccgttcaggcttttataatgcacattgatatcttgactgccgtaaagctcagcctcatctatgtgcccggagatctgcttaaagcggccgcagcctcattcgcagccgtaagaatcagaaaaactcttcaagcaagccggcttttgccgacgaaaggaagctgattttagtcatcatgattacatcatcatattcagatacagccggacaagcgccggaacggatcgcaattcagacagacacagaacagatcacctatcaaacttggaacaggctagtaaaccaaaccgcaaactggcttggcagcctttcagataagccggaaaacattgcaatattactgccgaacggcatcccatttttacaacttttcgcaggggcggcgcatgccggctgcacggcggttccgttagatccccgctcggctgcggcggaactcgcggaccagctgcacatcagcaaaaccgacctcgtcatctgtgaccgccggctgagcggcagactggacggcatcaaaacgcctgtcatcctgtgggatgaatgcgggcctttgatcgaggcggaaaaaacggaaggcacttttatcaaaaacaccggcctgcccttttataccggattcacctcgggatcgaccggtaagccgaaagccttcacccgctctcaccgttcgtggctggagagcttttcttgtacgaaacgtgaattcggcatttcccctgatgacaaagtgctggtaccgggcacgcttcgctcgtcacactttttatacggcgccgtcagcactttgtttatcggcggaaccgtcctccttcaaagaaaattcaatccggccggaatgaaagaccggctcagacaagctgacgttctatataccgttccgacaatgacggacgccctgctctcactagaggcgtttccggatacaccgctcaaggtgatttcttccggtgcagactggcccgcttcgtctaaacaagcgctgtcagagcgctatccccatttacggttgtacgatttttacggaacgtctgagctgagtttcgtggcgttcttatcgcctgaagacagcgcccggaagcctgacgcggcgggccgtccgtttgaaaatgttacaatcgaaatccgccggcccggcggggaacgctgcatgccgggcgaaacggggaagatttttgtgaacagcccgatgaaattttccggatacatcaacggcgcaaaacctgatgattccggctggatgacggttgatgacatgggatatatcgatcgtgaaggctatctttatatcgaaggacgtgaaaacgggatgatcgtatcaggcggcctgaatgtattcccggaagagatagaacgtgtgctcaaccgctgtccgggcgtcagaaaagcggccgtcatcggcattcctgatgattattggggcagcatcgccgttgcggtgatcgacggacatgcaaatgtaaaggaactgaagaaacagtgccgcgagcagctggcggcatataaaatcccgaaaaaatggctgttttcagaaataccggaaacagccggcggaaagatcgcccgtgccgccgtacaaaagcaggcaaaggacatgatggaatggaagctgtaattacggatgcgaagcggacgattttcgcccgggaaaacggcctgttaaaagactgtctccccgaagatttggcagctccgctgatccgacatttgagccggaacatgcccgaagacattgatgaagtcctgatcggaaacgcgacgggccgcggcgggaacctcgcccggctgtcagccttggccgccgggcttcctttgagcgtgtccggtacgaccatcgacaggcagtgcggttccggattggacgccgtgagggtcgcgtgccactttgttaaagccggcgcggggagcacatacatcgcgggaggagcggagagcagcagccgttcccctttctcatcccgggcgcgcttttctcctgaacacatcggcgatcctgatatgggcatagcggccgagtatacggcacaggcttacggcgtaacgagaaagatgcaggatgaatatgcccttctcagctatgaacggagcgtcaaagcgcacgaagacggcttgtaccgccgggaaattctcccctgtcacggattcgccgctgacgaaaacatgctgaaaaagcggaacatggggcctctcatcgcccgcgccaaacccgtctttcagtccggaggctctgtcaccgcggccaacagctgcggaatttctgacggggcggcggcagtttgtgtgatggaagaacaaaaagcgcggtctctcggtttaaagccgggattgcgttttatcggaagcgcggtaagcggcgtccatccgcattatccgtcagcagctccggtttatgccgtcaaaaagcttttgaaggaacgggacctgtcaccggatgatattgatatatacgaaatcaacgaggcgtttgccgtcaaaatatgcgttttttcacagcagcttcaagtgccgtattctaaaataaatgtccggggcggcgctctggccgtcgggcatccgtacggggcttccggagcggcgcttatcacccggcttttttatgaagcaaaaagacgcccggatgcccgctacgcagcagcagcgatcggcagcggaggcggagtcggactggcgcttctctttgaagtgttaacgtaacggcagtataatagatgatatcgataaaaaatgatcggagtggagactttatgactgccgtttgtttagtaagacatggagagactgattggaatgcccaaaagaagcttcaaggcaaatcggatattccgttaaatgcgacgggagagcgtcaggcgaaagaaacaggagagtacttaaaggggtccgaatgggatgtcatcgtctcgagcccgatgaaacgggccagaaaaacagctgacattattaacgggtttttgaatcttcccattgtcgtcatggaagatttcagagaacggagctacggtgatgcggaaggaatgtctttgccggaacggtcgaagcgctacccggataaaaactacccgaacatggagaccgcagaagagctgacagacagaatgcttgccggtttagtgaaagttcaggagcggtttcctgatcaaaaagtactgatcgtcgctcacggcgcagctattcacgccctcttgtccgctatttctgacggtgataccggcatacaaaacgcaaagcttgtcaatgcgtgcctgagcaatatcgaacgaattgaaaataagtggcgcgtcaaagattacaatgtaagcagccacctatcagaatcataacaaaaaggcccgaattagttttgggcctttttggcgagcatttttttctgaagatcatgtaatacggcgtccgcaccgtcaatgctccggcgctccgtccataccgccctgtccgcgcggtaaacgtgtccgttttttacggcagtcagctgtttccagaggtgatttttttcgagttcttcctcaccgtccaatagtacgatgtaatcaggatcgatatgcaaaagctgcccgggcctcattttgatagcgtctgatttcccgccggaatccgtctggaccgcatatgtaaaccctgcgagcgtcaaaagccgggatgtgaaaaaccggtcatcctttacggaaatgctgccatttgcagcgtcaattaataaaatcgtgccgccttctgcatccagctttcttttgatgtcattcagcttttcttcctgagccgacaattgtttctctatgatgccctctttaccgaccgccttttcaatggtaagggcagcatcaaccgcatcctgataatccgcagcttcatttttcaaagcgattgtcggagcgatctttgtcagctcatggtatatcccctgtgcaggcttgagtctgcaatgatgagatcgggttttaacgaagtgatttttttcaaatcgggatgtgacgggggcccgacggacggactgccgtcgtttcgctctttccggttatccgccgcggccgccggctttataccgagatcatggagggtgtcaataaagccctcattcaatacggcgatgcgctgcgggtgcgcagccacatgcgccgtccccagatcatgcctgacggcggtttcatgttcctgttctgagcatgccgttatgaagagaacggataagatcatcagcatactgaaaattggtttcatctgttccccctctttcgtttttccgcaattatatcattgacaatataagtatcaatgatattcattatcattatttttataaaatggtttcacagcttttctccctcaagaaagtcaaagactgattcatgccggccgctttatttcattccgctttcgtttccatcagacttctgcattcaacaaaaggtgacatttatcctgtttttgcctcagcttccaaaaatggaatcaaaccgttcgacccagtaaacaagagagcgattgcggctgtgtacaaatactcatgtccttccatcggttttttccattaaaatttaaatatttcgggttcctattaaacgaaagagagatgatatacctaaatagaaataaaacaaactgaaaaaaattgggtctactaaaatattattccatactatacaattaatccacagaataatctgtctattggttattctgcaaatgaaaaaaggagtggataaagagtgagaggcaaaaaggtatggatcagtttgctgtttgctttagcgttaatctttacgatggcgttcggcagcacgacttctgcccaggctgcagggaaatcaaacggggaaaagaaatatattgtcggatttaagcagacaatgagcacgatgagcgccgccaagaaaaaagatgtcatttctgaaaaaggcgggaaagtggaaaagcaattcaaatatgtagacgcagcttcagctacattaaatgaaaaagctgtaaaagagctgaaaaaagaccctagcgtcgcttacgttgaagaagatcacgttgcacaggcgtacgcgcagtccgtgccttacggcgtatcacagattaaagcccctgcactgcactctcaaggcttcaccggatcaaatgttaaagtagcggttatcgacagcggtatcgattcttctcatcctgatttaaaggtagcaggcggagccagcatggttccttctgaaacaaatcctttccaagataacaactctcacggaactcacgttgccggtacagttgcagctcttaataactcagtcggtgtattaggcgttgcgccaagcgcatctctttacgctgtaaaagttctcggcgctgacggttccggccagtacagctggatcattaacggaattgagtgggcgatcgcaaacaatatggacgttattaacatgagcctcggcggaccttctggttctgcagcgttaaaagcggcagttgacaaagccgttgcttccggcgtcgtagtggttgcggcagccggtaacgaaggcacttccggcggctcaagcacagtgggctaccctggtaaatacccttctgtcattgcggtaggcgctgttaacagcagcaaccaaagagcatctttctcaagcgtaggttctgagcttgatgtcatggcaccaggcgtctctatccaaagcacgcttcctggaaacaaatacggagcgtacaatggtacgtcaatggcatctccgcacgttgccggagcggctgctttgattctttctaagcacccgaactggacaaacactcaagtccgcagcagtttagaaaacaccactacaaaacttggtgatgctttctactatggaaaagggctgatcaacgtacaggcggcagctcagtaaaacataaaaaaccggcgtcggccatggccccgccggtttttttattatttttcttcctccgcatgttcaatccgctccatgatcgacgggtggctccctctgaaaattttgacgagaaacggcgggttgacccggctcagtcccgtatcggccaagtcctgaaacgtctcaatcgccgcttcccggtttccggtcagctcgatgccgtaacggtcggcggcgttttcctgataccgggagacggcgttcgtaatcggatcagaagcaaaactgagaacggatatgagcagcaataacagcgggagggcggccagatcttcaggcccctttatatgaagcattcggccgaagaatttggacagccgcttataaagcttgtcaatgatataaaacccggctaatgacagcagcagatacccggccagtccgatgtacacgtgcttcatcacatagtgccccatctcatgccccataatgaacaaaatttcccgatccttcagtttgttaagcgtcgtatcccacaaaacgatccgcttattcgaaccgatgcccgtcacatacgcattcagcgcattcgttttctccgacatatttacttcatacacatggctggccggaatgtcggccttgtcggcaagcgacaaaattttgctttccagctccttgtctttcagcggatagaaatcattgtataaaggatcaatcacgaccggctgcaggaaaaacaaaaacagggtaaacggcacagtaagacaccaagcgtaaaaccaccatttttttgtatgctttgtgatcagccagtaaaacacaagcacacacacggcaaacagcggaaaactgatccagaaatcaatgacatggtctcttatccagcttgctgctgtctgcgtcgaaatatgatacgcaagcgaaacccgatatccgatccactcaagcggaagcgaagccgccgtaacgatgagtgaaatcacaaatacgaagcttacgatttgcagcacccgaaagcgcaccgctgcttccagccaatgctttattttttttgcaagccccgtaatgagcagcagaaaaaataaaaaccaatctaacggcgctccgatgaaaaataaaaaatcctttacatttgaaaagttttcagcggctgccaggcggcccgggtccatgaacgaggacggatcggctttcgttccctttacggcctccgggacggcggagtctcctgtcataaagaaataccaatagaaaaaaaggccgtacagcacataggcaagtcccgctgccgctatccatttgcgcatggaagtctccctccttagccttatgacttactcctattgtaagcataaatgcaaataaatagaaccaagcctccgaaacggatgttaatcttttcacaacagaaaagaatggaacaacaggaagcgggaaagactaaaagacggagtgatgaatatgaaaaaaataatcgcgtttattgtagtaatcgcccttttggttattgctttcttctatgtatacagccggaccggcgatgtgtttccatcaagcaacgcagatctgattattctgtcagagaacggaaaaaaagaaatcaaaattaaagacaggcagaatgtaaaagatatgctcgatatcttgaaccaaggaaaacaagtcaaactgaccaaaagcgtgtctcccgattacgacggaacggtcaaataccatgaagaccgttttgattcattcagtatgtggctcgaaagcggcaattatatgatgtacaagcataaaaacacgtattacaaactgacccggcatgatacgaagcttgtgcaaagcatcattaaggaagaatcgcacagctgaccggatcagcatgtaaaagcgaagcccccggcttcgcttttcgtccgtcatttcggaagcatgtcccggaccgcccttctcagcagcttcccggtcgcgttcttcggaatctcatcaagaaaaaccacttccgccggccgcttatattttgccaaatgtgtttcacagtaatcgaaaaccgcctgctctgtcagctcaccgtccgcaggcactatataagcatgcaccgcttcccccgttttggcgtcaggaacgccgatgaccacggcttctttaatgccctcatggctgtagagcacttcttctacttcgcgcggatagacattgtatccgccgacgagaatcatatctttttttctgtcgacgatataaaaataaccgtcttcgtcgcgcttcgccaaatcacccgtgtacagccagccgtctttcagcgcgtgctccgtctcctcgggcatcttgtaatagcctttcatcacattcggccctttcacgatcaattctcccacttgatggtcgggcaattcgcgtccgagcgtatcgacgactttattttcgacatgtaaaatattcgtcccgatcgagccgggctttctcccccggtcaaacggattaaaacaagtaaccggagacgcttcagaaagtccgtatccctccagaatggtgacgtcaaaggtttgttcaaacgtctgcaacagagcgaccggcatggaggcccgcctgaaatgcacagtctgacggacgcaaaatcctccgccttgccgtgctcgtattgatacagatagttatacatcgtcggaacgccggcaaaaatggttgcctgacggcttttaatcagtttaaacacagaagccgggctgaattgcggctcgattaagacacacgctccgctcatcagaggcgcattcatacaaacggttaaacaaaaaacgtgaaacatcggcaatgccgccacaattttgtctttctcattcattcctaagtatccggcgacatcatttgcattggagaaaagattctgatgggtgagcatggcgcctttcggttttccggtcgtccctgaggtgtataaaatgacggcagtatcgtctttggacaatgtcggataagttctgctgcgctccgccgggcggagcatttttgtaaacgttgtcatttttaagcgcaattgagggtcttctgtcgatggagcgttctctgctgtctggctgataatgatatgctccagcagcggcagcgagccgtgcaggctttcaaatacgggaattaataggtcgatgccggcgatcgctttgacatcgccgtttttcagcatgtatgcgatttctgaaggtgtgtatgccggattaacaggtatgacgacaattcccgcttttaacgcgccgaaaaacgcaataacaaaatcaggcgtatttccgagcagcagcgcgagatgatccccttttttcagtcccctgtcctccaagccgtttgcaaatgctttgattttacctgccagctcctcatacgtcatgtactgatcttgaaacagacaagctggtttttccggtttctgcgatgccgtttcttccaatttggaaaccagattcattttcccaccctttaaaaatataatgaatgaatagtcattcatttatccggaataaacgttcacttttattatagaaaaatatagaaaaacactcaagggcaaaaagccccgagtgccgtaaaaccggaaactataattgtttcagcgcttcactgaccggcgtgccgcccgctgtcagatcgaacgctttttcatacgtattcggttcatcaagggatgcgataacggtcttggcgacatcgtctcttgaaatggagcctctttctaaatcggctgcggctttgatatttcccgtgccgggatcatttaataacccgcccggccggataatcgtatacgtcagaccgctcgcttcaagaattttatccgcataatgctttgcggcataatacggcttcagcgcttcattccaattgtcgcggttatgagcctgaagggcgcttaccataatgaaccgcttgatgccggccttctttgccgcttctatcgctttcgccgctccgtcaagatcaatcagaagcgtcttatcgtatccggtgcttcctcctgatccggcggtaaacacaatcgcgtcacagccttcagcggctttcgcgatgtcttccgtgcttccttccaaatctgcaagaacggcttctgttcccgcggcttgaagcgcttctttctgctcttctttccggaccatcgcccgcagcgtatgcgtgccgtctttttgaaacagcccggtcagacgctgtccgatctgcccgtttgctccgatgagaaatactttcatcatgatccctccccattcattatggttctatcatttcacaaaaacgggcgcagattcaaatcatgcgttcggcaaatgttctaataaatcagctcgaggaaatcttccagctctattttgccgaaatactgtttcagatcgattccggccagcgcctccctgatagcggttctgtcatactgttttccggtcagcgcctgttcgacttcactcacatctttcgcaccgaagaaatcaccgaaaattttgcagtcctgaatgattccttttttcacttcaagacgcagatcaatcgatccgaccggataacgtttcgaatgctgaaggttgaatgcgggcgaccttccgaaattccagtcccagttttgatagcgctcttcggaaatcttccggatcgctttccagtcttcatcggtcagtttatattccggcacttcggaaagatcatttgtattaaaaatatggtgaagcagatgttttttgaattcgtccgccgtcattttgtcatcaagaaactcgctgatgttggcgacacggcttctgattgacttaatgccttttgattcaattttgtcttttttcacttttaaggctgacacgacatgatcaatggcggaatccagcattaatgttccgtggctgaaaatacgccctttcgtcgaaaattgagcgttgccggaaatttttctgccgtccgcgacgatgtcgtttcggccgcttaattcagcttccacaccgagctggcgcagcgcctgaataacgggttcggtgaattttttaaaattgtggaagctgtcgccgtcatccttggtgataaaactgaaattcagattcccgaggtcatggtaaaccgcgccgcctcctgacagcctgcggacgacgatgattccgttatcttctacgtatttcgtattgatttcttctattgtgttttggttcttcccgatgataatcgacggctgattgacataaaacagcaggtatgtctgttcagggtcgagatgcttcacgcaatattcctcgattgcgaggttgatcctcgggtcggttatgttttggttgtcgataaataacatggtgctcctcctttatttctcccacttcaatccggaagcggcgattgtcacttcgcccccgaacacggattccgcttcttctttcagcttccggtgctcgccgaaatgaggcagatgtgtgagaatcagctcccccgctccggcctcctccgcgatacgtccggcttccaaactgttcatatggccggctgacgtgccgtcctggtccgcgtaaaaattgcactcgcagatcagcagatcggcattttccgcaaacgggataaacgcgtcctggtagcttgaatcagccgtatacacaacagaagctgaaccgtcagtaatccgcatcgcataacaagtgaccggatgcaccgttttcaggaaggtaatggtgaacggcccggcagaaagcgggcggtccggctgataggccactcctttcgtatgcgttttatatgtaagacgctcaaactgttctatatcagcatcatgcccgtaaatcggcagtgcatgcgtcccttttccgagaaaggagccgacctgtttggcaaattgaagcggcccgatatcagcgatgtgatcatggtgataatgggacaaaatgacggcatcaagctcttctgccggaacataggcaaacagctttgataatacggcgcttccgcaatcgacgagcagagaatagccgccggactgaaacagatagcctgaagttgcttcgtttgcggccggaaacccgccgcagcatccaataactgtaactttcatatgaccctccgaatgtttatgataaaaagatcctttcctccaatatacctatttttcgtacaaattgcatgttttaaacattgtgccaaaacagccgttgattttccaaaactgttataatacaatgtagagacaaaacaatgaaagagggatgggtatgttggaaaagatgtcggattttttcagaaatttacccggtaagaaatgcgaagaatgcggaaatgagattgttgagcagtatgagtgtcacattaatctgtgcaatgactgcttgaaaattaaggatatgtgacaatagggcgccgcacaattctaagttgtgcggcgcccgttttttcggccgtcatcatactttctgaatagggcgttattcaccattattagcaattatctgtacgttttaaaagattcagtattttcaatctatatttttctatagacggattgttttcttttctattataatttgttctaatagctatctttttagatacttattgcacttttttcttcgggaggtaatctatgaaaaaattacgctttggactagcgacgcaaattttcgtcggactcatactaggggttgtagtcggtgtcatctggtacggcaatcccgccattccaacatatttacagcctatcggcgatttgtttttacgcttaatcaaaatgatagtgattccaattgtcgtctccagcttaatcatcggcgttgccggcgcgggaagcggaaaacaagtcggaaaattaggcttcaaaacgattttgtattttgagatcattaccacttttgccattattctcgggctggctttggcgaatctgtttcatccgggaacaggcgttaatatacatgaagctcaaaagacagatatcagtcaatatgttgaaacagaaaaagaacaaaataacaaatctatcgcagacacattcctgcatatcgtaccgacaaacttcttccaatcattagccgaaggagatctgcttgccatcatctgctttaccgtgctgtttgcactcggcatctcggcaatcggtgaaaaaggaaagcctgtcttggccttctttgaaggtgtttctcatgcgatgttccatgttgtgaacctcgtcatgaaagttgcgccgtttggtgtttttgcgttgattggtgttaccgtttccaaatttgggctcagttccctgctttcactcggtaaactggtcggtttagtgtatgtagctttggctttctttctcattgttgtattcggaatcgtcggaaagcttgccggagtaaacattttcaaattcctcgcctatatgaaggatgaaattttattagcgttcagtacgtcaagctccgaaaccgtactcccccgcgttatggaaaaaatggagaagatcggctgtccgaaaggtattgtttcctttgttgtgccgatcggatatacctttaacttagacggatctgtgctgtaccaatctatcgccgctttattcctcgctcaggtataccacattgacttgtccatttggcagcagattacccttgtgcttgtcttgatggtcacttccaaaggaatggctgccgtgcccgggacttctttcgtcgtcctgcttgcgacattaggcgcattcaacattcctgcagaaggccttgcattcatcgccggtgttgaccggattatggacatggcccgcacggtcgtcaatctgaccggaaacgcgctggcatccgttgtgatgtcaaaatgggaaggccagtatgatcccgttaaaggcgcgaaggtcatgagcctcgccaaaacagaacaaaacacaaccatttcaggttaaaatgaaaaccctgcacggaatgatttccgcgcagggttttttatgccatcggcgatagaacgtaccggtgcaaaagcttcgccgtattaagaagcgataattcatgcgtgcgttcaaaagcgtgtgaagcgtcaattcccgggccgatcagcccgtgaacgatgtcatggcccgaacggatggctgctgaggcatcagaaccgtaatacggataaatatcaagctgataatcaatgccatagcgctccgcaagcccggccagatgttttctgagctgataatggtacggtccgctcgcatccttcacgcaaatggagacggtatattcatccgtagactggccgtcgccgatcgctcccatatcaacagccaagtattcgacggtctcaggaggaatgttggaattgccgccgtagccgatttcttcattattagaaatcagaaaatgcgtcgtatacggaagttcgattttctcttccgtgatgcggcggattaaattcaagagcagagccacgctcgctttgtcatcaagatgccgggacttaataaagccgctcggcgtaatctgcacgcgcgggtcaaatgagatgaaatcgccgaccctgatgccgagatcggacgtctcttccttcgtccggacaggctcatcaaggcggacttccatattctcctgattccgctctgccttgccggcgtccttgtagacgtgcactgaagtctgatgcattaagatggtgcctgtataggttttgccggaagaagtttggatctcgcaatattccccttcaatcgagtgatatcggaagccgccgatcaagtcaatcttcagccggccgtccgactttatttcctttaccatcgcgccgagcgtatcgacatgcgccgtcagcaatctgtgtttcttgtcatcacggccgggaattgtgacaaaaagaccgcctttgcggtttctgtaagaggagacgccccattcttttaaaagactttctgtataggcgacaacctcgtatgtattgcccgtcggactcggaatcgacaccagttctttaatcagttccatcgtatgtttcatattttccacaggtcattcctcctatcaattttattcttcttaaaatatactcttttgatccataacccgtccaatcttttcctgctcttttttcatagaatgaagggagcatgagcataggagggaaatgtatgatcagccgtaaaccgcacaagcggaaaaggtttcataatgattggtttgaggattggtttgaggatgattggtctggtgcagccttctggtgctgtaaaaaagaaaaagatcactgtaaaaagaaaaaagaagacccttgtaaaaagaagaaagacaaaaagaagaaagacaaaaagaagcatcatcattcatgccgccgctgctgccgtcattggtaatcgttcacacaagcccgttttacaaataaaattctcatgctccccaaacagcggatgctgcttgggtttttttattaaaattagtaccaagtaataatatcaggtgttataatctgatataaaggagtgattttttcatgtcaaaatctaaaattacagcaatcggtacatatgctccggcacgccgattaacaaacgcggatttagagcgcatcgtcgatacatctgatgaatggatcgtccagcgcaccggtatgaaggaaagacgcattgccggcgaacatgaattcacatcggatttgtgtgtggaagcggtgaaaaaccttgcagaacgatacagcggaactcttgatgatgtcgatatgattcttgtcgccacaacgacggcggactatgcgtttccaagcaccgcggcacgcgtgcaggcttacttcggctggccgcacacgggagcgcttgatattaacgccacatgcgccggactcacttacggccttcagctcgcagacgcattaattaccgccggttcccatcaaaaagtgattgtcattgccggtgaaacattatcaaaggtaacggattatactgaccggacgacctgcgttcttttcggagatgctgcaggcgccctattggtggaacgcgacgaatcagcgccgggctttttggcagccgtgcaaggaacagcgggaggaagcgcggacgtgctgtatcgcacgggactgagcgcagaattaaacggcgagccgcttaaaggcggaggaaatatggtgcaaaacgggcgcgaagtatataaatgggcggccagaaccgtgcctgaggaatgcaatgcccttttagaaaaagccggcttttcaaaagacgatctggattggttcgttcctcacagcgccaacatgcggatgatcgaatccatctgtgaaaaactgcccttcccgcttgaacggacattgacaagcgttgaatattacggcaacacttcatcggtttctattattctcgctttggatgaagctgtgaaagcaaaaaaactgtcggaaggccagacgctggtattgttcggattcggcggcggattgacgtataccggacttttggtgagatggggattttaatcgaaatcaaaaaaaagaggccctgagcatctgctcagcgcctctttttcttatgctgttatttcttcttccgttttgtgttcttttttgctttgcaccgtaaaatacacgatggtcagcgcgatcatgacaacggcgatgcccaacagaatggatgcctgctgccacatatagccgtaatcgccatttgaaatgacggcacggaacccgttgatgctgtaagtcatcggcagtgccccgtgaatcacttgatagaatcccggcaggagttcaagcgggaaggttcctccgcttgccccaagctggagcaccagaatgatgacagcgataaagcgtcccggatttcccatcgttgtcgccaataattgaatcatcgacaggaacgcgatgctggtaatcatcgtaaagagatagaatctccaagtgctttccacatcaagcccgattccttttaacagaaccgtggcgactataacggattgaatcagtccgacgagcagaatgacgctgaatttgctgaggaaccattcaaaaccgtttctcggacgccctgaagcttcactcagagggaatacgaccgtcagcatcaatccgccgacatacaagcccatagagagaatataaggcgtcagtccggtaccgtagttaggcacggaatgaatcgcgttatcgtccgtttttaccggatcggcaaacatgctgtacgttttgtcatctgtcttaatgtccccggtttgatcagccgcatctttcagctggctggacaattgtccggtgccgtctaaaagcttgcttaaaccggtgccgagagacgcttgaccctgctcaattttggacgagccgtcatggattttgttttgcgcgtccagcagtttcgttaagccgccagacacctggccgctccctgacactaacgcttctgatcctgatttgagctgtccgaacttgctgttgtattcgccgataccggccgtcaatttgttttggctttcaaagacggtctgcgctccgctgtacaatttatcagttccagccgtcagctggttaatcgcgtcttgtaccgccgccgcgccgttatacagtttcgatgtggactgaggcagtgctttcagctgatcagccttcgcttttacatctgccagcgcgctttttatgactgacatatccggaagctggatatctccgccggacggaagctggctgacgatattgtctaaatccggaaggtcggccttcggaagcttctcattcagaagctgaacaagtttcgctttttgctcatccgttaagaaatcactgtccttaatcacctttttgaccgcgtcatcccgggcatccaggctgtttttcagatcagaaagctttttcttaaactgctgcaattccttttcagtctgctcaagctccccaaccgctttttcaatatctgagaggttgactgaattgatcgcatcttcaaatgccgccgctttttgcgacacttcctgcgccttgctgtttaacgcgcttaatccattcgttaaatccggaagcttttgctggagctgcttttgtgcgtcaaggctcgttttcagcccgctggccacttggcctcctcctgaagcaatctgccctgatttatcttgaatttcggcgcttgcgctctgaagttttgcgatagagctgtcaagcgtttgaattccgcttgtcactttcgccgctccgtctgcaagctgctgcgttttatcgccgatggtggcggtgctttcagtaagcttcgctaaattttccttcagcttggcgctgccgtctttcgcgtttttcgtgccgtcgtctattttcttggcgccgctgctggctttgccgagtcctttggcaatatctttaaaattgtcaaaaatgacttttgcgtattgctccgtcacttctttcgacacggaggctttcagcttgtcgatcgccttttcgccgattgtcgcgccgacatagtttgatccggcattcgtatgatatttcagatccagcttcttcggatttttatccattaccgtgctggcgtttttagaaaaatcttcaggaatctcgaccaataaataatatttagcatttaataagtcctttaacgattgatcaagatcgtttgaaaaatgccaatcaaaattatcatttttctttaactctttcacaagatcgtcaccgatctgaagatgtttcccttcgtagtccgcccctttatcctggttgacaacgacaaccggcagctgatccaccgtgccgtacgggtcccagtacgccttcaaaaacactccgctgtagatcagcggaacgaataatatggcaatgatggggattaacagtttcttgttcgttacaatgtctttccactggctttttattgtattcaaccctgttgcctccttccgcaaactgactcatttgacaaaacggtcacggcacctaaaaagtgaaggatcatctattatttagataatccttgaccaacatacatttccagcaattcggcgatcgtctctttttcaagaggcggatggtttttttcccagtcaaatatcagcgcgatgtagagcttgagcatcacaaaagcggtcagttccggatcacacggtttaatgcttccgttttcaatggctgtttctatcttttctttaatgtatgacagaatggcccgctccattttcgcaatgacatcctgaacggctattgtaccaatctcggcgttctcctgaaaaattttaatagtcagctggtgtgtttttctgaattccaaaatcgcgacaagcgcccggtgaacattttcgtgaaatgaaagctccggtttcatcgcttcgtctgcgtgttccttcatttctcttaaaatagtggtgaaaatatcatcaaacagttcttctttgtttttgaaaaacgtgtagatggttcccttccccacatttgcaagctttgccaccagatccattgtcgttgctttgtagccgaattgtgtaaaagacttcgttgccgcttccagaatgagctttttccgatcgacggacatgtttcccacctcgttaaattgaccgtttgaacgttttagtcattttgtacataagataacttatcacagtcgcaaagaagattcaaatgttttttctctttattggtgttccctttacagaacgggaacatgcaaaaaacctccgttttacgataacggaggctggtacgtttcaaataaataagcgagtgaatcatatacggcggcttttccctggtcgatacagtcggggatgcccaccccttcgaaagacgcgcccgtcgcgtatacgcccggataggaagctttcagcgcatctctgaactctttgatgcgctccttatggccgacatggtattgcggcatgctttcgttccagcgggtcacacaggtcatttccggttcgccatttattttcattacttttttcaaatcttccattacgattttaatgatctcgttatctgaaagatctacgatggattcatctccggcctttccgacgtacgccctgagaagtgttttgccctccggcgccgcgtgcggccattttttattcgtccatgtgcaggccgtgatggagaaatcgctgtttcttgagataacgaatcccgtaccttcatgctccattttgacggctccctcaggaaaacctaaggcgacgttggcaacggacgtagaatgcatatctttgagacatgaaaccgccggcagatcagaaagcattttcgccgcggctttatgcggggctgtcactatgcatccttccgcatagagcactttgccattatcaagcgtcacggaatatcctttctcctcgcggccgatatgggtgactttcgttcctttcatcacctttgtcagcgtaagctgcttttccagctcctccaccaacgtttgaagtcctgtcgtcaccgttaaaaactggccctgctttttggccgtcagctgctgtcccgaaggctgcggacgtgattttttcataccgagaatcaggcttctgtgcttttgctcagtctgatagaattgcggaaacgtggacatgaggctcagcttatcaatatctccggcataaatccctgataatagcggttctattaaattctcaacgacttcgtcaccgacgcgtctgcggaaaaattcacccagagactgatcttccttcggtttgctcgcaggcaggacaaagtcaagcgccgcccgcgcttttccgggtacagaaaataaaccggtggagatgaacggagcgattttggtcggaatgcccatcaccgcgcccttcggcatcggatgaagcgtctcattgacgagcacgtaagactggccggtcgcattgttgacgagcagatgctcaagccccaaatccttaacgagctgcggcgcgctttttttcctttctaaaaaagaatccggcccccgctcaatgatgtagccgtctttatgcgccgtctgaattttgccgcccgctctcgggcccgcttcgatcagggtgacctcaagcggcagctgtttttccttgatttctttttccatgtagaaggcggcggctagtcccgttatgccgccgccgatgatgaccagatgttttttatcgccactcatttttatcgccttctttaccgtttaattctacttgtccagctctttcagcacgaccgctgcaagcgcgtcgataaattcaggctgtgcgttcggcatggccggacgatagtagcttgcgccgacttcttcggtcacagctttgcattcataatcattatcgtaaagcacctctaaatgatcggcaacgaagcctgcgggcacgtatacaaatgctttataaggatgcttttgatacagctcgcgcgtgagatcctgcacatccggcccgagccacggatcaggggtgttcccttcgctttgccagccgactgcgtaatcggtaattccggcgccttcggcaatcagttttgcggattcctccagctggtcaggatacggatcgccgtattctttaattttttcaggaaggctgtgcgctgagacgatcagcatcgcgtcatcccgttcttctttcggcattgattcatacgttttcttcacctggccgacccaataatcaacgaatttcggttcatcataccagctttcaacagacttgatggtcaagccgccgagcttctccgcttcttctttcgcgcgtttgttgtatgactggacgctgaatgttgaaaaatgaggggcgagcacaaggctgacagcttctgtaaggccgtctttatgcatgtccgccaccgcgtcttcaataaacggttcaatatgttttaatccgatgtacactttgaatgttacgtcgtcctggatttcatttaaacgctgtgcgagcttctccgcctgctcctgcgtgatttttgccagcggagaaatgcctccgatcgcttcatatctgtcttttaagtcttgaagcatgtgcggctccggctttcttccgcgtctgatatgtgtataataacgttctatgtcttcttctttgtaaggcgttccgtaagccatgacgagaagtcccattttctttttgctgctcattttgttaaacacctcttttgatggtctgtctaccttgattttgacaggaaaatcttcttataaccaacgatctgctcaggaagattgttccgtttttttggccgcggaatattcatgtacaaacgccgtcagctttttcagcgttgccggattgacatcagggaatacgccgtgccctaaattgaaaataaacccgtccgttttcatgccttgatcaagtatcgctttcgcttttttctcgatgacttcccaaggcgcaagaagaagcgacggatcaagattgccctgaaccgtttttgtaatgccttgttttctggcgtcatctatgccgagtctccaatcaagaccgacgacatcaagaggaaggtcatgccaatccccggccaggtggcttgcgcctacgccgaacatgatcagcggaacttgctctgctgaaagctcccggaatattctgtccatcaccggttttataaactgccggtaatcttcgcggttcagcgcgccgacccatgaatcaaaaatctgaatggcttttgcgccggcattaatctgcgcttttacataaacgataatcatgtccgcgagcttgtccatcagcatttgccacgcttgcggcatactgtgcataaacgcttttgttttgttgtaatttttagaaggcccgccttcaatcatataactggccagcgtaaaaggcgctcccgaaaaaccgatgagcggaacattcagctgttcgtttacgagtaatcggatcgtttccagcacgtaaggaacatcctgttcgggattcagttcgccgagcttttcaatatccgcagcagagcgcaccggctgatcgatcaccgggccgattccgttttttatttcaacatccactccgatataaggaagaggcgtcataatatctttatataaaatggcagcgtccactccgtactgctcgaccgggagcctcgtcacatacgcgcacagctcgggctgatgcgtaatttcgactaagccgtacttttctttcagcttgcggtattccggctgagacctccccgcctgtctcatgtaccagacagggacgtgatttgttttttctccccgtgccgcttttaaaaacgtatcattaaacgcttctcgtttactcatctgaatttccacctttcctcctgcaaccatacgttcgtgttcttcgcccattacactataccttgttttttctgaatggtatagaattgaggcttaatgttcaaaaaatcgccgaattcatgattaagaagaaaaaagcttcggctgaacgtattccgttccctctccttcttgattcgtctgcgaattaaatggaacgactttgtatgaagcccctgaaaacagattggcgtacggtatgtcaaagctgccttttcctttcaccgaatccagaagcttgtcttttccgtctttcttctcatatattcggtaaacaacccgatcatccttttgaatatcccattttaattgaaccgtaatcagtcccatcgccttaaatgtataacgggccgacagggattttaccgcctccagctcaatcgggctgcccagttccttcacattttcaggctttttgaatgtccggccgttttcccccgcttttgtgacgatatctttaaagagtctgaccgggtattggctgccgcctttcagataatgggttttatccgttttgtcatagcccatccagacggctcctgtcagtccgggagtgtatcccgcaaaccaggcgtcctttgtcgcgccggggatgccggtaaatgtggtcgtgccggttttccccgccaggtcaccttgatagctgccttgtgaagcggttccttcttttacgacctgctgaagcattctcgtcatattccatgccgtctgtccgctgaagacgcgcgttttgccgtttttaggcccggataacgtttctccgtcttcgtccgtgatgttctctataaaaaatggcttcgtatacattccgtttgccgcaaaggtatgataagctccggcaagctgaagcggagtgacgccttcagacagaccgcccagcgcaatcgcgagtccgttgtcagaaatgttcatgccgtttttctcaagatacgattttcccatatccacgccgatctgcttcaatgtccagacagcgggcgcatttatgctgtaagtgatcgcatcctgcatcgtcacttcccccttgtactgtccgtcataatttttcggttcatacccgtcgtaggacgtcagtttgtcttggagaagcgaatacggtttgaacttgtcttcctgcatggcgggcccgtatacggcaatcggcttaaacgttgagcccggctgccgcttcgccgtaaccctgttgtatccttttgtcacgtagtcgcgcccgccgaccgccgcgcgcacgcctccggttttattatcaataaagacggcgcttccctctgccgcctgatccgtccccggaaaatagccgctttccttcatgagggtatatgccgttttctgcagcttggaatcaagtgacgtccggatcgtataaccgccttgaagcagctgttctcctgacatcgaataacggtcttccgcctccttgatgacaagatcgatataactgtcaaaccaaggcgtttctgatgttttcttgacattaagccccaatgtccggccctgggctctgacggcttccttggcgctgatatagccttgatcgttcatcattgcaagaatcgtatcgcgccgttctttatttttatccggatgctgaatcggcgaataaagagatggcgccttcggaatcgctgccagaacggctccttctgcaacggttaaatcttttacttctttattaaagtagtagtgggacgcggcttgaatgccgtaaacgccatggccgaaataaagctggttcaggtacatttcaagcagcttgtccttgctgtaatcacgctcaagattgatggcgataatgacttccttcgtcttgcgcaaaaatgttttatcatgagtcagaaaaatgtttttcgccagctgctgggtgatcgtgcttccgccctccaccttgccgcctgctaaaacatcccggaacaccgcccgtccgacagacttcacatcaatgccgtgatgttcgtaaaaccgtttatcttcaacggcgataaaggcatctctcacatcttccggaacctgctgaatggataccggctcacgattttccgtatagaggctcgcgatttcatcaccgttttgatcgacgatttttgaagatgcgtgcagtattaatttcttttcatcgatgacataatggccgagaaatataatgataatgtatccgattaacgcgagaaaagcggttgccgccgcaattacagccggaataaagaatctttttttctttttcagcataagtcacctcgcctttcttaacttgtagtatgggaaatattgtttcgaattatgtcagaatgagtcgccaatagaaacttataccactcttttgatatactagcaagcaggaggtggctgatatgaaggtttatattacatacgggacagccgattttttaaagacgattgccaagaaacacccgagtgagaatatggtgctgatgcaaggggaggataatgcggttttaattcatgaaacaaatggagaaaccgtttttcaggcgccccattcctatgaaagcatcgacagcgtcggggaaatcaaaaatccgggctacgccgtcctcaacaacatcgccgttacccaggaaggccgtccgctgtttgaaaaccggtttaaaaaccgcgccggcaaagtggaaaatgaacccggttttaaagccatccgcgtattaagaccgctcgaaggcgatacgtatgtcattttgaccctgtgggaagaggaaaaagcctttcaggattggcagcagtcaaactcttatcaggaagctcataaaaaacgcggaacatctgccggtatcgacacgacgtctattttttcccgtccgtcttatgtaaccgcttattacgcaatagactgaaaaccgccggagattctccggcttttttgatgtcccgattttacgcatccttctttgcaccttccgcccgcctatgaataccctgtagcaatcctatttataaacggagtggttcaattggggatcggcgtctactcggtacatctgctttatgttgcttttatcgcggccattatcgtttttatgcttctcagaaaagatacaacctttatttcactcgccggcatttttgtgattgcgctatggacgacgcattcattctccgcttcggtcagcagcctgtttcacagctttacgtatgccgccggagaattgctgccgacgatttttatcatttgttttatcgtggcgatgagcggccttttgaccaaaaccggtattaatgaagcgatgatttctccgtttgcaaagctgatgaaagggccggctgtcgcgtattgggttatcggctgtctgatgtttgccatctctctttttttctggccgtcacccggggtggcgctgatcggcgctgtgctgcttcccgcagcgatccgggcgggcctttctccgatcgctgcggctatggcgatgaacctgttcggccacggattcgctttatcgggggattacgtcattcaggcggccccgaaattaacggccgatgccgcgggcatcccagtgagcgatgtcatgcaggcaagtattccgctcgttttgatcatggggttaacgacgacaatcaccgctttcttcctcatcatgcgggatcgaaaaaaaacgaaggccccctctccttggacagctccggttctttggacacaagtatgtatctgccgaaaaaactcagggtgatcctggcggttttcattccgcttgtttttctcgccgatattatctgcatgatcgtataccgcctccaaggaaacgatgcgacggcactcgtcggaggaaccgcgatcggcattctcctgatcattcatttcattgtatataaagagcggcatttagaaaagatcaccgagtattttatcggcggttttcaattcggctttaaagtattcggccccgtcattccgatcgcggccttcttttatctcggtgacgcggggtttaaaaatattttgaacaccccgctgccgaaagggtctgcgggaatcgtcaatgacctcggactggccctgtcccattcttttccgatgtccggagaattcgccggcatcgccctggccgcagtcggtgcgattaccgggctcgacgggtcagggttttccggtatatctcttgcaggctcgatggcaaagctgttttctgccgcgcttcatacggacccggccgttttaacggcgctgggccagatttcagcgatctgggtcgggggcggaacattggtcccttgggcactgattcccgctgcggctatttgtaaagttgacccgtttgagcttgccaggaaaaactttatccctgttgcggccggacttatcgtcacgaccatcgccgccatcatcattctcccgtagcaaaaagattgaaatcttctgacattttctatacaatcatgggaaaagcagacgagggggcatcgcttttgacgttaacgacacttcaaaaaagcttaaacgctcagcttgacgggctgtatgaggaaatggttgaaatcaggcgtcaccttcacatgaatcccgagccatcctttaaggagaaaaaaacaccggcgttcatcgcctcattttatgaaaagctcggcgtccccatccggacgaatgtcgggggcaacggtgtcacagcctgtattgaaggcggtgaaccgggaccggtcgtggcactcagagctgattttgacgctttgccgatacaggatgaaaaagatgtgccctatgcttcacaaattcccggcgtcatgcacgcctgcgggcatgacggccatacggcggctctgctcgcggccggaaaagtgctgtaccgcaaccgggaaaaactgaaagggtcatttgtgatgatccaccagcacgctgaggaattatctcccggcggagcaaaagcaatgattgaggacggctgcctcgaacatgtcgatgccattttcggcacacacctatgggcgactgaacccgtcggaacggtcttatgccgcccgggcccagtaatggccgccgctgacggctttacgattaaagtcatcggcaaaggcggtcacggtgcgatccctcacgatacgaaggacgccgttttaatcggctcacaaatcgtcacggctcttcagcatatcgtcagccggcgggtaaatccggtgcagccggccgtcatctcagcaggctcgttcaccgctgaaaatccgtttaatgcgattgccgatcaggcagtcatttcaggcaccgtccgctcgtttgacgaaagtgtgcgcggcctgctcgaagcagaaatagaagccgtcgtaaaaggaatctgttccatgcactccgcttcctatgaatatcgtttcaaacgcggctatcccgccgtcgtcaatcatcctgaggaagcggcgcacgcggcggcagccgcagcggaaacagacggcgttacgaaagtcgttgaaggagagccgcagatggcgggagaggatttttcctattatctgcagcatacaaaaggcgcttttttctttacgggcgccgctttagaaaatgcggaaaccgtttatcctcatcaccacccgaaatttgattttaatgaaaaagcgatgctgacggccgccaaggtgcttatcggcgccgcggtaagctacccccgctgacataaaaaaaacagccggtacattacgtaccggctgttgtaattcttaaatgaaaaacgtgccttgccgtctcaccgagctgtgacagcagtttataattggccgctccgcccacggcggctccgacgaccggcaaaagctgaaacaatttgaccacgtccagataatcgcggtattcctgctgaaaaactctccaatcgacatcatgctttttcgaatcccactgttcaatcattgagtatatgcgtttccgctgttcaccgcttgagaaagccagctgaaaaataaacagcaaaaacaatcgctcatccctgtctttcacatcatagccgtaaatggaggcaagatcgaacagacatttcattttaatggatagcagcaaaggaaaatcagccattcctaaaaaaattccgccggcccccgtaccgataccttcagctgccgcgaccttttggtacgatgcgatggtttgtctggcgagagcatctttttcagcaagcgtcataccgtttgtatcccgcttgcttttcaccagatttgaacccgccattgttgcttcggtcatttttttaatgctttctgtgatgacggcatgaattttttcgggaatccgctcatttattttcgcctgcattcctttagaaaagcgttcaagcatggaatctttgcgcaaaaaacgcgctttccattgcagtgcttcctgtaccagctgctgatcgtcggtcatctgtgtctccttctttcattgaggtttcaaaaacccgattgattacagcttgccgtactttttcaatcttccgcccatatacgatggcatgatcacaaaaatcagaacggctgaagcaacggccgcatacagcaccccgctgactcccgcggcataggctgacgctgcgcagaacagcagcgcctgcacggttaatgacgatttcatcagcgaaaagaaactttgcagcttcgctttctgattgaccgggtaaagctcctgcagagaaagatgatgaaaatgcccgaacagcggaagaagctgtattcccgtaataaagacggtaaatacggttaacgccgccgtgatccacggattggcggaaacgagcataataatcaggataaaaataatcgtgagcctgacctgaatgccgagataatcatttgaacgcagaaaggcccgcgcatacatataggagaacgttttccgctgctcaaacggaatcattctgagcaaaaagtcgagatacgcccggcgttttgcctgttttttcaggtgaggcacatcggtaaacagattggcgattctgtaaaaccgctgcttccttcttaattcatattcaatatgagcttcccattttaatgatttatgttttgcggctgatgtgaaatacacataaaggccggccatcacaatgtagacggcggcagcgtacacataaaacgactgtaagacgaagtataaaagcagcatattgcagataaagcgtatgaccgcatccatcattttcatgcttctgtcattcataaacgtcatccgccactccatggcctgattccacgcttttaccgccagcatctgaataaatacggcggcatacgacgcaagcgacgcccccggacttacagcgaaaaacagaggcatgcatacaagagacagagcaataagcggaaacagctgtgacagatagctgtacttaaatgaatgcttaaagtatgtccccattttcggttcaagcggcagcagaaacacgaggtccgcttcctttaacagcgtccggacgtatgaaccggtcagcacaaatgaaaagagcaccgccatcacccaaaaagagggaaaatgaacggggatgtctttgacccacttgctgtaccagctcgccgcgccggcaataaaaaagatcagcacaatgacgagatgatcattgagcatatatttcatatacattctggtttcctttatatgctcttcaagccgggactgccaaatagtagacatattattcatggccggcgtcttccttcgtcagttcaatatacaagtcatcaagagctgcgtctttcatgccgaactgctctctcagttcttccagtgtgccgcttgcccgcacttcgccgttatgtaaaataatgaatgcgtcacagtagcgctctgccgtagccaggatatgcgttgacatcagcacgcttgatccggcttttttcgcggcgtccatccgctccagcaatgcattgatcgcaagcgggtcaaggccgagaaacggctcgtcaatgatataaagcgagggctccgcgagaaacgcgcacatgatcatgaccttctgcttcatccctttggaaaagtgagcgggaaaccatttcagccttttttccattctgaattctttcaaaagcggaggaagccttttttcaagcgtttctttggaaaggccgtacgccatggccgtcagctccagatgctctttgagcgtcagttcttcatacagcaccggcgtttcggggatgtacgtaaattgcgagcggtagctttccttatcctccgaaaacgtcttgccgttcagctcgatcgagcctttatgcgggtccattaatccgataatatgccggatcgtcgtgcttttgcccgcgccgtttaatccgatgagtccgacaatctggttcggctcaagggtgaatgaaacattttttaagaccgggtttctcgtataaccgccggttaagtcttttaccgatagcagagacataatttctccccttctgattcgtttttcttcatagtaccaaaaataaagtctgatttgaaacgattccctttttttctcacgtgaaaagcgtgcatagttatcgttttggcggacatcataatgtatgtagaaggaaacagctttaatcaactgaaaatgaggtgtttataaaagacgtcttagaacagttggatgaaaatcaacatgtcctgtgcttacaatttcttcacacactgctttgatgatgttcttcattcatgatgaaataatcaaatgaggtgtttgtcccaggaatgattaagcagacccataagtcttcattttaaaaacaaatgaggtgcttacaaaaggcatatttaattttctgtgataaagctcgtacttctgcatcagggtgaacgcgcagccgttcatcctgttttttgttttgaccgtttttgtggtacgatgagaatatacatatatttcttttcagggaggaaacccatctatgcacaaagcggacgattgtattttctgcaaaatcattgccggtgacattccgtcttcaaaagtatacgaaaatgaacatgttgtggcgtttcttgatatcagccaagtcacaaaaggccatacgctcgtgattccgaaaacacatatcgaaaacgtgtacgagtttacgcctgagctttctaaagaatatttcgaagcggtgccgaaagtcgcacgcgccatccgcgatgaattcgagccgatcgggctgaatattctcaataataacggtgaaaaagcgggccaatcggtgttccattttcacatgcatatcattccgcgttacggaaaaggcgacggtttcggggctgtctggaagacccacgccgaagactatacgcctgacgatcttcaggagatcgcttcaaccgtcagaaaacggcttgcctcatcttaaagatgaggtttttttgcgtccggcaacacaaaaaacataaaattatattttttcatatcaaaaaaatcaaaaaattgtgataggataattgtattatttcttacactaaagcggaaaacagggagagatcgtaaacatggaacgtacaacgaatttcaatgcaggacccgcagcccttccactggatgtgctgcaaaaagcacagaaagaatttgtcaacttcaatgacaccggcatgtccgtcatggagctgtcccaccgaagcaaagaatatgatgcggtgcatcaaaaagcaaaaagccttctgaaagaactgatggatattcccgacgattatgatattttatttcttcaaggcggcgcaagccttcaattctccatgctgccgatgaactttttaacgccggagcaaacggctcacttcatcgtaacgggcgcatggtctgaaaaagcactcgccgaggcgaaactgttcggaaacacatccgtcacggcaacaagcgcagattcaaaccacaaccatataccggaagcggacctcacaggaatcaaagacggcgcctacctgcatcttacgtccaataacacgattttcggaacgcagtggaaagagttcccgaattcaccaatcccgctcgtagccgacatgtcaagcgacatcctgagcagaaaaattgatgtcaaaacgtttgatgtcatctatggcggcgcccagaaaaacctcggtccgtccggcgtcacggtcgtcatcatgaaaaaatcatggcttgaaaacgaaaacgccaacgtccctaaaattttgaaatactccactcatacaaaagccgattcactgtataatacgccgcctacatttgcgatttatatgctgagcctcgtccttgaatggctggctgaaaacggaggtgtcgaagcggctgaacggcgcaatcatgaaaaggccgacgtcctgtacggcacaatcgacgcaagcggcggtttttacgcggggcatgccgcaaaagacagccgttctcacatgaacgtcacgttcaccctccgcgacagcagtctcacgaaaaaattcgttgaagaagcgaaagcggctaaaatgaccggactcggaggccaccgctcagtcggaggatgcagggcgtctatctacaacgccgtcagcctggctgattgtgaaaaactggctcagtttatgaaaaagttccagcaggaaaacgaataaatttcttctaacataacggttcctttgatatactgtttgcatatcaatttttccggccatcgcaataaatgacgagcatattattggatggcgaaaaagcttagcagaggagagcttagtatgaaaacaaaagaattagtcattatggccctgtttgcggcaatcggagcggtgcttcattccattatgccgccggtattattcggaatgaaacccgatatgatgcttgtgatgatgtttatgggtattctgttatttccccgtgtgcagaacgtgctgatgatcgggattgtaacgggaatcatttccgcactcacgacatcttttccgggcggacagcttccgaatatcattgaaaaaccggtaacggcgtttctgtttctcgcgctggcgcttttggtgaaaaagagcgtgaaaacagcggccgccgccgtcattacaatagccggcaccttcatctccggtttgctctttctggcgctggcccttctgattgtcggcctgccgggggattcaccgccttggtgctcgcggtcgtccttccggcggctgcgctgaatgcgatcgccattatcattatgcatccgattgtgcagacgatcttaaaacggtccaatatgattgaaacggtgaaataaccgcataccgaaacctcttccggccggaagaggttttttaatgtgtttcagcatgttttatacgagaagttttgtgaaaaagataaggaacaatgcgagggcggttcctgctgagcagacgatggccttttggcggacgacccgcttcggcggataagaagcggcctggccgagcagtttcaggtaataaacggcgcccgccgcaaagacaagagccatacaagataaaacaatcataaagacagacaaccttctccctccttttcccttaaaaaatatgctaaaataaagcaagctatgtatagaagtttattcttctgaacaaaaatgataaaagttatgagaaaaaaaacggggtgattttaaatggctgacggacgttcccttttaacaggccttttcgtaggcggattgatcggaggcgcagcggtgttactttcggctccttcatccggaaaagagctgcggggcaaaatcaaagcgaattgcaattcaattgaggacacaatcaaacggttaaaaaaagacggaatggcgcttaaagaccagcttgtccaaacggcgaaagaaagcgcagaagtcattaaagacgtaggcggagagcttcagaccagcattaaaaggtggcaggaggaaatcaagccgcaccagcaggatcttcaaaaggaaatcgctgatattgaagagaaaatcagacagctggagaaaaccttacaaaactaatatcctatacaaccaaaaaaagtgcgggcatattgcgttccgcacttttttttgcggtttaaagcctttcacagcaacggattaagaatttattataaaattcttaaattttcatctttattaatctttattttattggcataatagaggaaaagaaaatgtgaagcaggtgatctgtattgaatcgtgttgaaccgccttacgatctaaaagaagctttaatctatacccaaaaaatggcgcagctgtccaaagcactctggaaatctatcgagaaagactggcagaattggctgaagccgtacgaccttaatattaatgagcatcatatattatggattgcctatcagcttaaaggagcttctatttcagaaatcgccaaattcggcgttatgcacgtatcaactgcatttaacttttcaaaaaagcttgaagaacggggatatctgaaattttccaagcggctgaatgataaacggaacacgtacattcagttaacagaagaaggggaaaatgtattcgaaagcctgcttgaggagtttgacccgtctagaaacgcggtgtttaaaggctcacagccgatctaccacttattcgggaagtttccggaagttgaagaattaacctgtgtcatccgccacatttacggcgaagattttatggagatattcgagaaatcattgacaaacataaacaatgattttgatagtgaagacggaaggctgaagaaaaaaacagacgaatcggctgtccatgaaacggctgaagagctggaaccgatcaacagttaatcaaagtgcttcattatctcaataaattcttccatcagcgctgtataaagcccctgctcatacagagcaaaaatcgtttcatgaacatctaatttttcgttcagctgtcccgcaaaaagcgcaaggagcttgtcaaacgtcacaaagccttgcgctttttgcgactccagctcgtcctccaattcgcggcagatccgcccgacctcttctccttcttcttcggtcagccctttttcaatcatcatcgcataaaaagggtacttatccatatccaccgttttcaccagcaattgtatgtaatattctaaacgcccgatacgctgatccattgaatccatccgtttcacttctttctatctttaatcttattttagctgataatgaatggagaagaaaggttaaaccgtacatttccatgtttcaccgagctcttctgttcttccctttccggggttattttttttctttaaaaaaggattgattttttctcctgaagagagtaaattattttgagattgtattccatctttgtacggaaggatgactctgatgaattgctggaaaaccattaatctgatcaaagattatggtgcggttcgtttattattgactgctgtaggttttatgatcctgttttttatatgcaacttcttggcattcgggctgctgcgtccgaatatcagtttaagtgacgggcacgtgtttgctttttgtgttctgctcgttgttactttatttgtacataaagtcatacatgtcctgccgatgatctgtaaaaaaagaaaaaaggaaatgaaaatgtacttcttgcggatgccgacatggaaaggcataccgaaaacgacgatgctgatttctacgatcagcccgtttttattcattacgccgctattgttttatgccggactggcatttccgagacacgctcattacttttatatgatttcgagcattcatgcgggttattgcctgcctgatcttctgtttgcgctgcacctggtcaaagcgcccaaatcatgtctgattgaccaggaatccgacggttttgatattttagtaaaaaaagtgccggagtcttgatatcccgctgatttttcaggttacattctatcttttttaataaatatttggtaatgtaatatgggagcagttcagagagagggggaatctcccatcattttattctattttatcgtggctgccctgtttattctttattttataaacaggctcacaaatacattatgccttgtcagagagattcctgaagaccggcaggataaggtattccgttttattaatgtatctattttaattttactgatctcttcattcgtcgagatctcctttactgtgtaaacaggcaaaaaaatatggctgacggaggtctgacccccgacagccatatttttttcttaataaagccaagaagcgccgatgatgatcaataagatgaacagaacaaccaataatgcaaaaccgcctgcaaatacttcacccatctccaaaagcacctcctacaaaacgttttatttttccaattacatcatatgcaatttacttctgaaacgattaggcgcccgggtaagaaaacggatcgcttttagaaaaagcgatccgtttcgcttaacaaatgtaagctgcacctacgatgataagcaatatgaacagtactacgagcagtgcgaaaccgtttgaatatcctccgcccatggttcattacctccttttcatgatcaatatatttgtatgtatcaggaaaaagtttgactagacgaatgccctttatttaaaatctttttacagaaagccacaatatgttatgatacgcatatgcaatttaatttggatgattaggagtgtttaaaggaatgaagaaaatcgcgatagcagctattacggcaacgagcgtcctggctctcagcgcttgcagcagcggcgacaacgacgtgattgccaagacggatgccggaaatgtaacaaaaggcgaactctacacgaatatgaaaaaaaccgcgggcgcaagtgtgctgacacagctcgtacaagaaaaagtattagcaaaaaaatacaaagtatcggataaagaaatcgataacaagctgaaagagtacaaaacgcagctcggcgatcagtacagcgcccttaaacagcagtacggcgaagattacctgaaagatcaggtgaagtacgaactgcttgcacaaaaagcggcgaaagacaacatcaaagtgactgacgctgatacgaaagaatattacgacggcttaaaaggtaaaatccgggcgagccacattcttgtcgctgacaaaaagacagctgacgaagtggagaaaaaactgaaaaaaggcgagaagtttgaaacgcttgcgaaagaatattcaactgacaactcaaaagacaacggcggcgaccttggctggttcgataaaaagtcaatggatgaaacattcagcaaagctgcattcggtctgaaagtcggacaagtcagcgatccggtcaaaacaaaattcggttatcatatcatcaaaaagacagaggaacgcggcaaatatgatgacatgaaaaaagagttgaaagaagaagttcttaaacagaaattaaacgacaactcagctgtacaggcggcaattcaaaaagtcatgaaaaaagctgacgtaaaagtggaagacaaagacttaaaagacacgtttaacacttcaacttcttctgaatctaaataaaaaaaactgtgcgggctctcagcgagccccgcacagtttttttatgcgatggaatgattggagttttcttctgcatccgtgttttcacttgcgggcgccgccatacggcgctcgcgttcctgttccatccgttcaatatacacccttccttctttttcaataaacgactggtcaagcttttcctcttctttagctgttgtgaaaagcttataggcgctgaaaataattccgataatgcaaaggtatacccaccaaggaaaaaatagcacgtcggtttcctccctttttcacccagagtctttattctaagctatgcttgataaagacaagttatgagagctgaacgtaaaaaagaccgatcatagagaatcggcctttttatcttattgatggaacgtcggtttgtagaaagaacggttttccagcgcaaatacacgctctgtgtattcgcccggcttcacccgttccagcgctctgtccatcatgatcatttttgcatccagattgtcaatgtagtgcagaatttccgcttctttcaccatcggcggtttcgggcttccccattccgcttttccgtgatggcttaaaatcaaatgcttcagaatcagcacttcttcagcgtcaatctgaagctcttcggctgcttttgaaagctctgtcaccatgatcgaaatgtgcccgagcagattcccttccacggtgtacgtcgtggagacggggcctgaaagctcttttactttgccgagatcatgcagaatgactccggcatacagtaaatcccggtcaagagacggatacagatcggcaatcgcttttgccaggttcagcatggacactacatgatacgcgagcccggagacgaactcatggtggtttttagccgccgccgggtaatccataaactcagccgcatattttttgaccagatgtcttgtgatccgctggatatttggatttttcatttcaaaaatgtattgagtgacggtttccatcatttcatttttcggaatcggcgccgtttccagaaaatcatcaatgctgacattttcgttctcgccggccggccggatgtttctcagcttaagctggtttcgtccgcgatagtgatggacatctccgatcaccttcacgatcgtctgcgccgcgtacgttacttcatcagtcggcttggcatcccacagcttcgcttcgatatctcccgattggtcctgcagcattaacgtcaggaatggttttccgttgcttgcgattcccttagtcgaagatttaatcagaaagtattgatcgacctgctcgccgacctcgtgcagcataataccttttgccattctattaaaagctccctccatatcttacataataccagtatagcacatacctcttttttgaaaataaactcttttatgacaggagccgcatgacttgtccgctgtgaaaagaccggctgacatgctcatggcaggtgaaataaagtatctgccgcccgccttctgaaagctgattcagcacatcaaacagccgctccagccgctgcctgtcaaaatggacaaaactgtcatcaagtaaaaacggaagtgataccgcagattccctctctgacgcaagggcaaaacggatcgccgcataaagctgctcgcatgccgcctgtgacagttcgcctgctgaaaacacagttccgtctttccgcatgaccataatggaatcatccgcctcggagaaatacaatttatggtaacgtccgtccgtaagcggtccgtataatgcaccggcggtttctaacagacggggaagcgtcacttttttatgccgctccattttttccctgatgatgtgtctgaccgtctgtaatgcggcccactctttagcggtttttttcacgcgctccttctgcatttctgtctgctgttttaaatcggatacaagccccgaggactccagctgctcttgtttcaccgttaataaagcggttttctcacggagctgcgcgcttttttcctcaagcgtttttttctctgtttccttctgaacgactgtatgttcaagttcggacactgtgcggctcatatacggctcaagctgttttccgcctatgccggacaagtgcgttttgatttcgcgcagctgccgctctgtttcccggcggctttcattcagtctggcgagttcacaaaagtgttcgcgattttttgcgcctgccgccatgaaaagctgtttgacctgctgttcgtagtaatggacttcttcgtttaattcacgcatttgctcttgtgcatgcagcagatccgtttcgagcgcctgctttcgttttgcttcctcacgggcccgttccgcctgtaccagcaaaacgcgcagtctttcttttacggacagctcccttccgtctgaaggactcagctttttgacccggtcctcaaatgctctttgcaacttttgcagccggcccgcttcaatggtcagctcatgcttattaaggatttcttttttgacatctttcatcacatgatatgcgtcaagaagatgggaaggacttcctgaaaaacccagttccttcataaaaagttccgcctgtttttcagacggcgccatttccgcctcccattcttcatattggcggatgactctttcatatgccgcttctttctgttcaagcacggcttgatccgcaatcagctgctgccggtgccggccgtcacgccaaagctcttcctgcagaaggtcagccgcttctttggagatcgtcggcttctttttcttgtgaccggcccctcctctttctgacggcagcggtttttgcatgccggacagcatatacagcagcagagcgccggtaaaaagggcggcgggcagccattcctttaacatagcgaaaatcgcaatgaacagaatgcccgcaccgagaaagagctttttttgtttggcgcgctgtttttccagctgctgtacatgtgcctgccattcgtttccttctgtatcagccgtttgcttatatgattgtaaagcggcttctttttctttcctgacagcggggtccaaaatgttttccgacgtcaaggcatgttttcgttcggcttcttccagctccagccgcgcttgttcgaaaatcgcatcaagctgtgtctttctttctcttgcctgtccggcgctctgcacggcttcctgcagccgccattcatattcataatcggtgttcagtgaaagaatgccgtcttcctcatgtcttccgagctgctgcaatcctgacaaaacgcgggcagatgtctgccggatctgtgattggatggcggcaagctgttcaccgcgcgattcgtacatatgctgctcgccggaaagctcctgcagctgccgctctgtttgcagcaagtcctcatttggagcgagcagctcagcctgccgcctgagttcagcagcttttgcccgaagtccctcaagacgggcagctttcggatggagatgcgattcgtatttttcaagctgatgcatcccgtccttcgggaattgcttcaatgcatccggataagaagaaagttcgctttccaaggctgtttttttgtctgcgagcggctttgcttctatcgccgattttactgttttgatttcttcagttatgtctttcaatcgtgcttcggcatcctgcaaacggccgccggcgctttttttctcttccagaaggctgtgatagcccgcttccgcagcttccgcctgtttcagctgggcgctgagccgctttaatgtatccaactcctgatttaagcgggggttccgcccgttcggcttatacatcctttcaagttcttttgccagccgcccgtcaagctttgccgccgcttccgacccgaataagctcgaatacaggagaaactcgccgattttgtcccggttaaaagcttgaatctcctgcagtccgaatacatcgaacgaatagatcgcttcgtacagcgcccggtctgtatcggagagaagctgtttgagccattctccgtccttgatttcgcctgaagccgtatacactctgactttttcggcagcgccttttgtccgttcgattttgacggcaccgtgatcgccatgcttcaattccacagtgccgccgtaaaccccgccgtttttcggttcgtatttttttgatttcggaaaaccgaacagcacgcttttgatgaaggacatcaatgttgttttacccgcttcatttaatccgtagatcacttgcacgggagaatctgacagctgaaaactttggtcggaaaattttccgtattggtaaatatgcattgccgttattttcatcgctgaagctccttcatctggcgtcttaaaacggcttgagcctgccgcttaatatccagtatctcttcatctgtaaatgaagtgatctgacgccgatatacgggatgacgctcaagggcttcaaatacaccgctcatgtccgcgcattgttctatgtcctgaagcagccctttaaaaaacggatcgggcggcacgctgtctgtttcatccgtccgatcctcaagcgcaagcggccagacgaaacattcctcttcggcctcttcctcctgtaaagcggaaagaaactcctctgcgatgcctgcgggcgcctccgtccaaaagcggggcgccgcgccgcgaagcaccagcctgacacatgccgggcggcccgccgcgcgcaagccggagaatgtatccgatgcggctttcagaagtgaagtcatatgttcagctcctgagatatcaagatcaatttcctcccataacacatcatgcgcttctttgaattcccaagacatctcaccgtttgccgcccggacgagataatatcccttaggcccggtttcttttaaatgccgggcttgaatattcccggggtaaatagcggcgggatgctgggcggacagaacctgccgtttatgaatgtgtccgagcgcccagtaatccatgccgcttttttcaaggtcttctttcgtaaacgggcagtacgggtcatgcccttccgctcctgataacatgccgtggagcatgccgatatgataaggcgcgccggtcattttccggtaacgggccgcctgattgaccgttacgcttctttcctgatagctgcatccgtatatgcttgccgcaagctctccgtttttaaagaaagatttttcctccggtgtacccgaggtgaatatatgtacattttccggccattcaatcggcgtccacttaccgcccaaatgatcatggttgccgaatatgacgaacacttggatacccgcttcctgtaatctcgtaaactgttttctcaaaaacagctgggcttttaaacttctgttggcttcgtcaaacagatcccccgaaagcagcacgaaatctgcctgctcccggagtgccccgtccgtcagacggcggacgctgtgaaatgtgctttctttaatacgcgcatataccggttcaggcagattcgaaatgccgtaaaacgggctgtccagatgcaggtcagcggcatgaataaacgtcagatcagccatctcgccctcccctttctgcagattgaattacccttattttagcaccgtttttatacgaatgcacgttctgtaaaataaaaaaacagcccggctgttccgggctgtttcatttattttttggagatgcgcagcgcttgtttgatcgctttgaatccgctggcgtttccgtaaatcaaaacgccgcctttgtaaattttcgcgccgaccgccgcaaagatcacgatagtgaccagtgtcagggcgatcccggccgcagcctgccaaaacgggatatcgagcatcccgacgcgtaaaaacataatcatcggcgtgaaaaacggaatgtaagatgtaacggtaataaaaccggcgtcaggattgccgatgccgaacatggcgatcataaaacctgccacgaccaaaaaaaccatcggctgaatcgtctgctgtacgtcctctatccggctgacaacactgccgagaaacgcggcaagcgtcgcgtaaagaaaatagccgagcaaatagaaaatgacggcatagactatcgtcgagacgggaacatccgtaaaattgaggaatgcactgatcggcgacgacgcatcattttgagggttcagcttcagtgagagataacccgctgcaatcagcaccgcaaactgtgtgatccccacgagcgcgataccgaacagtttggcaaacatctgctgaatcggcggcatgcttgaaattaaaatttccatgacgcgggacgatttttccgtcgccacttccatcgcaatcatgcttgcgtacatgataactgagaagtagatgacaaacagcatgatgtatacaagccccattacctgaccgagctcttcctcagatttcgcccctttttccagcgcgtctttgctgacttccggcggagtgtagaggctgctgactttttctgccgaaatgccgagcttggcggtttcgacagcggttttcgtctgggttaaagcctgcttgagcagtttatacgctgattcatcagaaatggtcagcgccttgtatgctcccgttatcgttcctttttgatcctgtctgatgataaacagtccgtcccattcaccgtctttgacacgctttacggcatctttttcggactccttcgtctccattgcctgcagatcattgtctgtatccgccgctttaagctgttttgcaaacgccgggtacagcccgcccgtttcatcaatcaccgcgatttgctgcttgccgtcatccgattgaaacacggaaataatcgattgcaggttggtcaccgctaatactaataaaacggtaatggcggtcgaaataatgaatgactttgttgcgattttgtttttatatgtatgaaacagcataatccaaaatttattcatatacggcccccaccttttctataaaaatatcatgcagtgacggctcttccaattcgaacttccgtataaaacctttcccttgcagcgcccggaaaatatcctgcgaaaccggttcattcgcgacctgcagtctgattccgtcatttgtttccttccatttcacgacaccttcatgcgtttttaaaaagctgaggtcatcatctgaatgaacggtgacattttttttgccgaaagaccgcttaatgtctttcagattgccttgaacgacgggttttcccttctggagaatgcacaaattctcgcaaagttcttccacatgctccattcggtggcttgaaaaaacgatggaaacgccgctgtttttcaaagaaataaccgcttctttcagcagctcgacattcaccggatcaagaccgctgaaaggttcatcgagaatcagcagttcaggcttatgcaggacggccgaaatgaactggattttctgctggtttccttttgacagctcttcgactttcttattcttgtaatctgtaatgccgaagcgttcgagccatgtcatgagctctttttccgcctcttttttgctcattccttttaatctcgccagatagacaagctggtcactcaccttcactttcggatacagcccccgttcttccgggagatagccgattttttcactgatggaataattgaccggcttccctttccaggtgatatgcccgtcagtcaggcttaaaagacctaaaatcatccgaaaggtcgtcgtttttcccgcgccgtttgcgccgagcagcccgaacatttccctttcaggtatttgcaggttcaaattgtcaacagcggtaaagctgccgaatgttttcgttacattttcaattgtaagcacgaatccaactccttccttgacccattatatactaataatgggtaaaaattaatggaggattttaaattctttatcagaatatcattctataaagggggtgacatgatgggacaatatgtattgaccgcattccatgcgtcgggagaaacgctgctggatgaacggatcgaagcagataatgaggcggaggcgaaggccgccggagaggctttgttagaggaaaaaaagcttgagaacagtactcaccgcttggtaaatgaagccggaaagctgattttattccacagataacagaagctttccggcttctgtattttaccggttaaattgcggcgtccgtttttctaaaaaggcgcggatgccctctttatgatcatccgtttttctcatattttcctgggcctttcgttcaagagataaaacgtcttttaaccggctgatatggaggctctgataaatagccttcgtttcaatcatcgctgacagcggcgcatgcagcaatcggtcgatatacggttgtgcccctccgcagggccgccgctgaacagcccgtcggcaagcttgagccgcaccgctttttcagccggcaatttttcaccgctccaaatcagttttttcgcttcgatctcaccgacgcgtctcattaataaataatggcctcctccgtcgggaaccaatccgatgccgatgaaattcatcgcgagtcgggcgttttcttcggcgagcaccacatcggcgcacagcgcgaaactcagcccgagccccgccgcggctccgtggatggcggctatcacaatttttttcatatcatagagcgtcagcgtaatggattcaatcattttcatgagccgttcatattctcccgaatcatgatccgacgtcatcatctggatatcaccgcccgcggaaaatccccggccttcccccgcaagaggacgataagcgcttcgctgtcggctgccataacgcatgcattttccaattcccggagcatttgttcattcagcgcgttgtaactgtcaggacggttcagcacaatctctgcgatctttcccttttcttcataacgaatatactgcatgtttactccctccttgaatccgcttacatattttgttcaaatgatatattccttcccccgaagcgaaactcctttatttttcaaggtcaacagataccgaaaaatgcatatcatttgaaactgaacatacatttttatatagtgaaattgatatacaaaacaaaaagggggaaaaacaccgataatgaaatatgtgatactcagcttgttactgagcttttttatggtgctgttcccccttcggatgtcgctcttccttcccaattggtgacagaaacagacagccatgtacaaatttcggtctacccgcaggaaacggaatcggcaaagacgccggttcaaaccaaaaccgctccgcaaggcctgtcaaaaggatacggtgcgttatcccggatgatctccctgttatctgtcaaacctcttgatcaattcattgattccacaatggaaaggacatgcgccattccgatacaataccagtcaaattacctccggcatcagaccatttctcattgccaatctgtatttacggtgtaaaaacagtatattccggagggattttttatgaatattaaagaaaacgatctgcccggcatcgggaaaaaattcgaaatcgaaacgagaaatcatgaaaaaatgacgatcatcattcatgatgacggcaggcgggaaatttacagatttgatgaccgcgaccctgatgagcttctggcaagcatttcacttgatgatgcggaagcaagacagattgccgcgattatcggcgggatggtgtacaaaccgcaggcgcttgaatcgattgaaatggcgttcagcgatctgattatcgaatggtttaaagttgaaaaaggggcaaaagcggcagggcggacgctcggcgaactggatgtgcgccaaaactatgacgtgacggttatcgccatcataaagcatgaccagaaaaagtttttaaacccgggggctgattcgctccttgaagcaaacgatacactcgtcctctcaggtgaaagaaagcatctgaaaaaactgatccaagacttcctctccagagacggagtgtgatctgtttatggaccatctcgtatttgaagtcggtacggcgttagttcttgtggccattgcgagtgtcatcgccaataaaattaaattctcgatcatccccttcctgatcattttaggaatgcttgtcgggccgcacgcgccccaggcgggcatcattgatctgacgtttatcgaaagccgggaagtgattgaatttttcggacggatgggcgtcctgttcctcctcttttacctcgggcttgaattctcagtcggaaaattagtcaaatccggacgttcaatcgccgccggcggaacgatttatattctgattaatttcagtttagggctgatctacggatttatcacgggcttttcctttttggaagtgcttgtattggcgggcgtcatcacgatatcatccagcgccattgtcgcaaaggtgcttgtcgacttaaagcgcacggccaatccggaaacggagctgattctcggcatcattatgtttgaggatatctttctggcggtttacttatccgtcgtttccgggcttgttctgggagacgcgacgtctgtcgggggcgcgctgatgtcaatcgtgatcgctttcggatatatgctgctgtttttcattgccgcccggaaattgccgcctctgctgaacaagctgcttgatatccgttcaaacgaggtatttgtcatcgtcattttcgccgcgctctttttcattgccggcttttccgaaacgattcatgtcgctgaagcgatcggcgcgctcttgctcgggctcgtgttttcggagacggcccattctgacaggattgagcatcttgtcgtgccgttccgtgactttttcggcgccatgtttttcttcagtttcggcctcagcattgatccgttttcactcggagatgcggtatggctcgccctcggcgccgttctgctgacgattgccggaaactttatcgccggcatgatcgccgggcgccgggcggggctttctcataaagcatcgtccaatatcgggctgaccattgtgtcccgcggcgaattctccattatcgtcgcaaatctcggcatcgccggcggcctgtccgcttcacttaaacctttcgccgccttatatgttttgatactggccatcttcggccctttgctcacgaaagaatcgaagcggatatatctcctgctgaacagcgtattcaaatggaagacgcctgaaaagaagccgcagaaatcataaaaaaaaactgacctcttcataagaggtcagtttttttgagcgggaagaaattgctgaaaagccgtttttttattaatggagaaatgctcttttcccagaatggtattgatgattttttggtttctgtaaacagacagcttcaaattcgtagcgcccgttccgtgagcatgatcaagattcgttaatgtgaaaaaatgatgccgtctgtcgtccttaaagacaagacgggaatcggccgtcactttaaaccgtttctcatcctcccattcgatatcgggggcgattgccgtaaaccattccggaatatgaggtttaaagccggtcgccaatatcactttttctgaatcggccgtaaaagtttcatccatctgccattgatgaaagctcagtacacagcgcccgttttgcttttcaattttttcaagctccgccatcggctgaatatacacgtcaggcgaacctccgctgatcgatctgtgatacagggcgtcgtaaatggtggcaagtgtgtcagaatcaatgccgtggcgcagtccgtccagctcagggagtgtgttcagccgttctttaaaaggcaggcggttaaaatattccacataatcaggtgtaaacatttcctgcccgagcttggcggtttccaattctcgaaatccggcggagcgtgtcacccattgcagccggctgcgccggtattgttcatcatgcaataagtcagaaaagatctccgcggcgctctgtccggagccgaccactgtaattgattcggcgccggcgagctcgtctttccggaacaaatattccgtgctgaccatcgtgtcctgacgcgctccgtcatcaatctctgcgggaataagcggttcagaccccgtccccatgacgaaatgcttcgtctgatagacactgatgcttccgtcctcaatgttcttgacgctgacttcataatgtccgccggcatttttcacgccgattacctctgagccgaaacggcatgatttgatttctgaagccgcccagcttaaatagtcgttaaattcccgtctcggaatatcaaattcattaaacgtataaaaccggtacagccggtcatgttcatggagaaagtttaaaaacgtgtagcggcttttcggatcggcgagcgtgaccaggtccgccagaaacgccacctgtaaatccgttcctttaattaatagaccgggatgccacgcaaattctttctttttatcgaaaaaaagagcgtctgttccgggtatatcctctaacaatgcggcaagccctaaattaaacggcccgattcccgctcctatgacatcatacatattatgcacctcttgcgaataacagtctgatgatcttttcccgtttttacagacggttaaacataaaaaaacggcacgctgattccgtgccgtttttgatattataatgcagatttgacgaacatctcatctaagtatttgattttctcttctgtataatgctcgaatcggtcattatatgatttcgggtctttcggattggcgaagtgcgtgatttttccggtttccggatgaatgaatttgcttgccgccccgcagccgataccgataatcgtctgcacttcttccataatcataatgttgtagatgctttcctgacccgggaaggagtagccgacattttcaaggtttccgagaatatttttctgccgatacaagtagtacggcgtatagccgtgctcttttgtccagcggacggcgtcatccatcatgcgggacacttcctgtctgtcggcaactttatacttatgcttgtttctcgtcatttctgacgcccgtttaaaagaaagcgtatgaacggtcaaagattcaggcatcagcttttccgtttcttcaagactgtgcctgaactcagccgtcccttctcccggcaggccgatgatcaggtccatgttgatattattcatgccgtgtttgcgggaaagatggtatttttcgatggtttcttcaacggtatggtgtctgccgatagccttaagcgtttcgttttcataagattgcgggttgatgctgattctgtcaatcttatacttatttaaaacggcaagcttttcctccgtaatcgtgtcgggacggcccgcttcaacggtaatctccctgatattcgcgacatccgggaaagagcggaccatttcttcatataaaagatccatttcttcagcggtaatgcttgtcggcgtgccgccgccgaaataaatggtcgtcactttgatatcatgccgcttcagccattctccgattttctgcatttcatagtgaagcccccataaaaaggagccgactcttcccgcctgtccttgaatggcataagccggaaacgtgcagtaggcgcacttcgtcgggcagaacgggatgccgatataaatgctgacttcatctttgacccggtacagatcgggaaccgcagcgagctggcggtcgacaatctcctgcatcagattgattttttcatcatggatcagatagtcttttttcagatcggcatgcgcctcttcttttgtcaggccgctctgcagctttttatgaagaagtttagtaggcctgatgccggttaagattccccatttttgtgtcatgcccgtatgtgattgaagaagatttaagtagacatatgacagcgtgtttttcacctgtttaaatacttctttttcgctccatccggcaagaagcggtttcgtgtgatgttccttttcgccggttcctttgatttctccggataccgacacgctgtctgcatcttgagaaatggcaagtgagatgacgagatcagagggttcctccgtttcgccgtacgtaagaacacactcttcaaaaaataaattcgcgatgttttgcagcggacgatgcagcctgtcatccgttatgccgtctatttttatttgcaatgtgatcaccttatttttcagattcaaaactttctttagtgtacagaaagaacaggctaaaatcaatccgcgaaaaagccgcagaccggcgtttcgcgtctgcggctcttgattacggccgtttcatatggaacttatcgagaaagcctttgcggtgctgcatgcggaaatattccttaatcatataagccactccctgttcatcatttgaccttgtcacccagtccgcttttctttttaattcatttgaagcattccccatcgcgacgccgagaccggccagctcgatcatcggcagatcatcttcctgatggccgatagccacaacctcttccattgaaagcccgagatcagcggcgaccatcgaaagtccgctttcttttgaaacccctttaggcacgatgttcagtttttctccgttgacgcggatcacatcgacggccgggaatgctttcattatcgtatccgttatatcagcctgcaggccatcttcagcatgcacttcaatgacgggcgctgaaaccggctcatcaaggagcaggtcacttaatgattcgacaaactgcaccggataaaagatcgggtcagacggatgaatcatcgttttcccgaccagattggagttcactttcttcttgttaccgatcgaatatttttcgtgaagaagccggatattgcattgatagctttcgagcacctgaacgatattaaacgtgtgatcttctgatattttcttttcaaaaaacggctcatctattttttcagaaatgtatgcgccgctgtgggtaatcaattttgcattcagctttaatattttcgccactttttgagcggagcgaaaatggcggtttgtgaccagtgtgacgtaaatcccttttttcttgacgtattcgatggcatcctttgtcgtctgatgaagtttgccgttggagcgaagaagcgctccgtctatatttaacgccagcatttgttttgacacagagaagtcccctccttgatgactgtacttgtcattaggatatgaccctgtctctttgtttagaacaaccttttctccgcagcaaaaaagcctgcctcaagcagactttgaactgtcgttttgttgggatacgatcgatttgctgccttctccccaatgtgcatttctattaacgaaatatatcaggaaccccttatttgaccgttgatgcgctcgtttcacttactctctgttgctaccccttaacataccaggcagtataggcgaccgtatccttagatcatctgtaagtgtaggcgctttcagagttattatctcaataatattgttaaaaaacaagggtttttttaactaaaaaaatcaggggaactatctgtgctgaatgtatgataaaattgaaaaggaacgtatattcgcatataataaaagaaaaaaagcggtgactgtcatgtctctattaaaagatatttataacgaagaatttgcagaagcacttctgcacagagtcaaatcggcgtatccggcttttgagcgggacaagtgccgggcgctgatatttcaggaagattggcccggactgacgttaaaacagcggatgcgccggatcacagactctttatatgaaacactgccgaaggattacatacgggcgcttgacgtcttatatgagacagctccccatttcacagggctcgccgggattatttttcccgattatgtccaacagtacggaacggatcactgggaagaatcaatgaaggcgcttcagtttttcactcgtttttccacttccgaatttgcggtccgcccgtatatcaggcttgaccgggagcggatgttcaaagagttcctttcctggacggagcatccggacgaacatgtcagaaggcttgccagcgagggctcaagaccgcgcctgccgtggggaatctccattccggctcttcttgaagatccttctccgattctccctgttctggaccgcttgatgcaggatgactcgttatatgtcagaaaaagcgtggcgaataacctgaatgacatctccaaaacccatccggatcttctggcacagaccgcagccgagcggttcggaagctgtccgcacacggattggattttgaagcacgcctgcaggacactgttaaaaagaggagacaaacaggcgcttgcgattttcgggtttgaagacgcctcccggatttcattggaacgttttacactgaattcggaaacggccgccatcggaacaagcatacatttttcttttcagatccgctcagccgcccggcaaaaagtcagggttgaatacgcgattgattttgtaaagaaaagggggcaccgcagccgcaaggtgtttaagatgtcggagtccgccatggataacggaaacgtaaaagccttcagcaaacgtcattcccttaaagatttaaccacccgcaagcattatcggggaattcacactctgtctgtcatcattaacggaacggtaaaaggttcgcttgatttttctgttgaataaaaaaacccctccatttcatagatggaggggtgtggagcttattgcgggctgccgtaaagctcttcaagaggtttcataatgattttgtttaactcgccgatcagcatgctcatgcgctgttccgcttccatcagctgagaaatcaattcatgctgctgtacgagagcaaccgttttttgtgcctgctctacctcttcctgagtgatttcttcacctgacatctgtttctgctgcagctgcatctgtacattgcggaagttatcaaacatgcgttttgcggattcatctgcgtttacttgatcataaagccctctcagacggctgtattcatcactgtttcgcaaagctttttcaagatcatatgctgcatcataaaaatgaactgccatagtaaccgctcctttcttcctttcggacataccactccactataacagactgcggagcgactttcatcatcggcgtatgttttccttagaaaagaatgacaaacaaagcctgaattgctccgattatcccgccgagcagaccgcctaaatacgttatcatcttaaattctctcttggaaatcgacagcaccatttcttccagccgttcaacgggaaactgatcaacctgctctttgaccacttcctcaagacgcagccgtttcagcacatcctccaaatgagcggcaatactgccgagtgccgcatcaagcagcttcggcgcgtacgtccccgtaatctccccttcataacgggagatgatgtcaccgagccggcattcgaaaaagggcgcggtttgaagtgcggccaaagcccgctttttcatgctgaacagcagatctttcgcattccacttttcatcggcctcataaagtgtataagatttgagcttgccccattcttgagaaagcagatcagccagaagctttttcgtttcctcattgcgcaaaaactttaacagctcaggcagcacacggtctgccaagcttgaattgccgaggaacatctgcaccatgccgccgagcatccccgggaattcaaaaagtcgtcaatcatatttccgagtctgtctttcccttcttcgctctcaaaataatcaatgctacgcttcaggatataatctgcggccagcgggattttttcatccagcttttcctgcagctcatcaggaagccagtctttgatggcgcggtgctcatatttccggtacaggtccgaaagcttttcatcggtaaaacggtcaatccaggcatccgtcttttcctgcggattccggatgcccgcggcggccaaagcttcgtgcaccgtcatttcggaagcggccattttttgcgtgaattgttcggcgaaaagaagcgcctggtttttaacgttatctgataaaagccgcttttttattccttccggggttaaaaggtggttcgtcaccatgagccccatttgttttgccaattcatcccgtcttttcgggatcagccccggcgtaaacggaacccgttttccgaacaggtaatacggccggtacggacgaaataacatctgaatggcaagatgattcgtcaccgcgccgatcgcggctccgatcacgatcataaatagaaacgttcctgctatgcccattccttttcttctgcctccatcttatgttctattttcttgatgatatatctattcgtattatagaggctggcgggcatgcgggcaaatgaagaacctgaattgttgtttgtgaggaataaggcaagatgctgtttcgtactctttacagtagatcatcttttatgatgcgcttagcatatttattggatggaagggccgttccatcagcggctttttgaataaagggggagtagtaatatgacaacactcggttttatgtctgtatcccgccggcacgaagaagattacgccggggaattggctgaaagagcgcctcaatataatgtgcgcttagcccgctttacaccgtttgatatatttccggattctttgcgcgtgaaagcgctcgtctatcacccgcaaagcggaaagtggaacgaaacggaaatcgatattcccgaatatatttacgaccgctgtttttacggaaaatccgctgaagcgcaaaaagccaaaccgatcgtcgaatggctgaaaaaatatccgaaaacggaatttatcgggcgggggcttcctgataaatggacggttacagatgcgctccaaaagcatcatctgatcagtccctatattcctgaaacggccgaagtcagccgctatgaacaggtgcaattatacttagccaaggaaaaagcatgtatacttaagcccgctttcggcgcgggaggcagaggcatcatcctgcttgaaacaggcaaaaaatcaattaccgccacttactatatcggaaaaaacaaacaaacaaaatcattttccaatcacgtgtcttttaagtcttggtgcaaaaaagtgctgcagcaccgctatttgcttcaatcctacttaaatatccaggataaagaacggcatccgtgcgacatccgcattttcatgcgcaaaacggagtcaggcgtttgggaaacggtcggaaaagcggtcagaaggggttatcagaacggtcttttatctcatttgcccggaggatcagaaccgattaagtttgacatatggtttgaggaaattccgagaaagcagcaggccgttttattggatgatgtcttttcgatcacccaatccgttccttatttccttgatgaacggttcggaccgctgtttgagctggggctcgatatttgttatgccaaagacggacgcatctggcttttggatgtcaattcaaagccgggacggaaagctattttaagcgtggctccggaggcgaaagaggatttgtatacgggtccgctgagacgcttccgcgaacttcagtcacaggacagcaggaagggagtattaccgcgtgaatcataaagggatgattgtcggcatcgataaaaaaagcaaaaatacgctgtttctcccctcctccatgaaacgggaagggcttttatccgctgccttcgggaccaaggttgtcaaatgccgtgtagccttttctcaatcacttgaaaaaagcgcgctcctttctgaagatttgtttgaggagctgttgataccgtataaaagccgggctgactttctcatacacggccagacggtgcacatcggaccgctgatcggcgttttcacagccgggttcacatcatcgccgtcccgcccgttaagagaccgtacagccttcttttccaagatgctctcacttcatgaacaggcgaacggatattgtttcgttttcggagctcatcagatcaactgggaagaaggcaccgtccaagcgctgatttataaagaaaacagctggaaacggacgtccgtcccgcttccgaatgtcgtatatgacaggctcccgagccgaaaaacggaaggagttccgcttttacagcagacaaaacagaggctgatgaatgactatcagattccgtggtttaatccgcaattctttaataaatgggacattcataagcttctggaaaaaaacagtctcaccgcttcacttcttccaaaatctgtcctgcacccgaatgcagaggcgttagagacgttatgcaacacatttgacaccgtctatatcaaacctgcagacggcgcactcggaacggggatttacagggtggaaaaaacagatgccggcttatctgtcaaacacacgaatgaggaaaaaacggtggtgacggcagagtattcagatgcggcatccttcatgaaatcatttaaagaaaacaatgacccgtccgcatttttaattcagcaaggcattgacctgatccggctggatggacgccccgtcgatttcagggtgcacacgaataaaaacgccgaggggaaatggacagtgacggccattgcagcaaaaatttccggtgaaaacagcatcacgacgcatctggcaaccggcggagaagtcaggacgttagctgaattatacggcgatccgcgagagagagtcggcatgatgcggaaactttccaaagccgccttggcggtcagccgcgtgttaaatgagcacattgaaggttttatcggcgaaatcggttttgacctcggcgtcgatcattcagggaaagtttggatgtttgaagccaattcccgccccgggcgcagcattttttcccatccgaagctgagatcggtcgattacctgacaaaacggagaaattttgaatacgcgtcctatttatcagaacggtccatcaccgccccggaaaaactttggcggtgaggctgtctttttttggttttacccgggacaggcacagaatgatgagctacaatgaacaagatcaacatttcctacaaggagcgtgaacgtcatgatttcgcacttcagctggaaaccgttattcaaaaaagagaaactgcccggatggcggatttcattttactggcagggtacgcattacgaaggggtttaccataagtccggtgacattgaatggggacacacacatccgggaaaagaagagccggctctcgtaaaagagctgcacgaattaatgctttatcacatatatgactgaaagctaaaagctcagccgcatcaggctgggcttttcttttcccttccgctatttaccacccggttttccgaatgagatgccctttgattcaccataatacgtagtacaaagcggcaaacagcattgggtgaagccgagctggcaatggttttcattccgaaaatcatcggctggtgcaattccagcaaacccaaccatactacttaataaaggagatcatacaaatggcaaacaacaactcttcaaaccaactattagtacccggcgctgctcaagcaatcgaccaaatgaaatacgaaattgcttctgagttcggcgtaaaccttggcggagaaacaacttctcgtgcaaacggttctgtcggaggagaaatcacgaaacgtttagtatctttcgcacagcagaacatgggcggccaaggcgtacaataactcaataaatggcttacagaaggcgcgggataccgcgtcttcttttatgccgtcacccttttttcctattccacataccctaggaaaaaaggagggaaaacatgtcattcattgcctcagtcaattgggagctgtttcagttcgtaagtgtttctttggtcaatgaatatgttgcccaccatttcccgtttattcacaggcattcttttccccgctgctttgaatgatataatgagcggcgaggaggttttttacatgaacatcgctttactcggagcaacgggaagagtcggacaggcttttataaaagaagcgcagaaacatggacacatggaaatattcgctcttgtcagatcagccggaacagtccttcccattcctgaaaaacagatcataacagggaatgcgaggcggcgggaagatgtcagccgattgatttccaaagcggacacagtcgtgagctgtctcggcacggacggtgacgataccctttcagccgctatgacccatataatagacggcatgaaacggcatcatgttcagcgtctgattacgatcggcaccgcgggtatccttcaatcacggcttatgcctgatcaataccgttttgaatcggcagaatcaaaacgaaaatcaacaagagccgcaaaggaacacgcccgcgtatacgagatgctgctggcagaggatcttgactggacgatcatctgccctacctaccttcctgacggagacgctgccggagtttaccggttcgaacaggatcgccttcctgaagacggcgccgaaatcacagtcggagacacggcacattttctgtaccgcgagctgatcagcccgcagtttgtcagaaaacgggtaggactggcttactgaatgaaaaaagggcgaatcttttgattcaccctttccgattacaccgcggatttcgccgttcctttctgtaattcatacatttgatggtactgccccttttgcgccattaattcgtcatggcttcccttttcaatgatgcggcccttttccagcacgagaatctggtctgcgtgtctgatcgtggaaagccgatgggcgataataaatgtcgtgcgcccttcttgaaccacttgcagcgctttttgaatgaccgcttctgtttcggtgtcaatgtgcgccgtcgcctcatccaaaattaaaatggccggatcgaacacaagcgctcttgcaaaagaaatcagctgacgctggcctgaggacagtgtgccgcctttttcggtgacgggctctctgatgcccttcggcaaagattgcagaaggcttgcggcgccgacttggcgaagcgcttcttccgcctgctccagagaaatacgctgatcatcgagtgtcacattggagccgatcgtgcccgagaaaagatacgggtcttgcagcacaatgcccatatgcgacctcagctcctgccttgacatgctgtatatgcttttaccgtccagcaggatatcccctttttgggcatcataaaaacggaacagaagattcaggatggagcttttgccggaccccgtatggccgacgagggcgaccgtctcccctttttcagctgtaaagctgatgtgtttcagcacctcttctccctttcgatatccaaaagaaacatcgcggaattccactgtcccttccgcctttctgtctgcgggagcgccttcttcttccgtttcctcctcctgtaaaagctcgaatactctggcggcagagacacgggccaattcaagcttcgaaaattggttgacaatccccgtaaccggctggaacaaacggtttaaataatcaacaaatgcatataaaacaccgatcgaaacaattccggccgcactcagactcgcgcctccgaaataccagatcagcccgacaaacgccagattgcgcaacacattgacaagactgtgggacatgagggaatttaaggacagcattttgtttttgtagcggaaatgagcttcattcaattcttcaaattccttcatcgtttccttctcgcggcggaacgcctgaataatcggcattccttgaatggactcgttcattttcgcattgatgtcactgttaatggaacggattttttgattgaagacggatgcatatttgcggtacacaaccgaccagatcattaaaatcggaataatcagaaggcaaacggcggccagcctgacgtcaagcataaacagcgccgtaaaaatgccgagcatataaacgccgcttgtgataaatgtcgacagcaccgttacatataaatccctcaccgcttctgtgtcattcgtaatacgggccacgacttttccggcaggcagattatcaaagtagcggatcggcattttctgaatgtgtgaaaatacatcctgcctcatgcgctgtatgatccggttcgctcccatctgcagcagataatgctgaccgtaatgaaaacatacggaaaacatgagcaatcccgcataaatggcggtcaacgtcagcaatccttttatttccggacggtaaaattcaaaaatctcctgtcttgataacgtaatgacgggatatgacctgctttctttaccgtttgatattgtcagccggccgtcagacaccgaacggtttccgtcaaaactgacgggacggtcaacaaaatagtagcccgcaccgacttgataaatgtgcgcctctccggttttatccgcccccggtttgagccggtcctccctgacataatcatgcccccggaacctgacggcgcccggatcgtccgcagaggctttaacccatgttttttcaatgccgagaatgtggtcatcaatcattttttttccgataaacgggccggtcagctcagtgccgaccgcaataatgagcaggacgaccgcccatatcagcagcttcttatattgaagcgcgtaattccataatcttctcccggtcttcatgcgcccgtccccccttcttcaagagaggacagctgctgcctctcatattgttttcgataccagccgttctgcgccaatagctcccggtgcgtgcctctttcagacacccggccttcgtccatgacgagaatgagatctgcgtgttcaactgccgagagccggtgggtggtgataatcgttgttttatgccgccgttttttacggatgctgtcaatgatggcggcttccgttttcgcgtctacggcagaaagcgaatcatctaatatgagaatatcaggatcggtcaaaagcgctctcgcaattgagatgcgctgcttttgtccgcccgagagcgctacgcccttctcgccgacaagcgtctcaagcccgtcggaaagcatgccgatatcgttttcaaaatgcgcatctttcagcgcgccgccgatttcctcttcgtttgcatcctgccgtccgtaaagcagattctcctttacagtcttagaaaataaaatatgatcctgcggcacatagccgatccacccgcggagctcctcaagcgggatctcctgaatcgggacgcctgtaaacgtgacctctcccgcaccgggcggatattcacgcagcagctgcttaatgatcgtcgtctttccgcttcccgtcttcccgacgatgccgagtgtctgccctttttctacggaaaaagatacatcggaaaccgccggtcccgctccgctcggatacgtgaaagtcacttgttcaaaaacaagacgcccgggctccttgatgccggcggggcgcttgggcccgatcacgtcaggctcataggaaagcgtctcattgacacgatccaaggaggcattgccgcgctgcatgatattgattaattctccgatcgcaaacatcggccagatcatcattccgaggtacacgttaaacgataccagctctcccagcgtcagccggttttgaaaaacgagataagcgccgtagccgagacctatgagatagctgaggccgacgagaagtttcacagtcggttcaaaaagtgaatcgataaacgccaccttcatatttttctcatatacatccgccgtcatatcaccgaaccggctgacatcatttttttcctgcacaaatgcccggatgacccggacgccggataccgactccagcaccttgtcatttaatgatccgaaagcatcctgcgcttccgtaaaccgctcatggatcttttttccgtacaggctgaccgcagccgccattatcggcagcggaataatcgcggcaaatgtcagcttccagctgatgagaagccccattgtcaaaaatatcgtcagcatatacatcgtcgaatcaacgagcgttaagaccccgaagcccgtcgtcatactgacggcctgcaggtcatttgtcccccgcgccattaaatcgcccgttctgtatttctcgtaaaacggcggtgacatttgaagaagccttcccatcagctttgaccggagaattttctccatgacattcgccccgccgaaaagctgatacatccaaaaataagacagtaaatagacggctgccgttaatgcgagaaaaacacatatgtaaaacagcatcccgcttttcgtaaacacgcccgccttcatatcgtctatcgcattaccgagaagtttaggcggaaacatctcaatgacattcacaatcaataacagaacaatcgctgtcgtatagcgcagccaataggctttaaaaaaccacgcgagcttttttaatacagtaaacaaataccgtcatcccctttcatcaatcagccgccctcaagcttttccggattgtttttcattgttttcgctaatgccgccacatgcatcacacctgtctttctttcatttttttgtataaaaaaagacatgaagcctcagctccatgcctcttattattataaataaggtacagacccgccgtttatgcgcgactgccccgtttttaagcaaatgttcagaaaacggaagctgtatggaagtcacgccggtattcagctgaagatgagttgacaagctttagttttgacatgatccatacctcctttttcctatattgttccttcatcatataaataaatcctttttttgtcaatgcgggttttacatttctgccgcacgggtattgtaaaacaaaccttttttactgaaaggatgaggctgatgtttcacgcagaccggttgatagcagcttttgacggaagtgatgatagtaaaaaagcgcttcaaaaagccatagacctttcaaaaacgttccacgcggatttaacggtcgtacattcccacagtgcaaaagatacccagacgattgttgatcccccgaggccgggagccggggcaacgtatatcggcggcgggattgcaagcgttcctgacccgcttcaggcggaaagaatctcccctgatccgatgatttatgaagaccgtacggaagaaatcgttgcggaagcgagaatgctgatgaacgacagccagattgacggggatatcgacattttagaaggtgatcccgctgatgccattatcgagcatgccgaccgtatatcggcggatttgatcgtcatggggagccgggaccagaacaggctgaaaaaacttttattcggaagcgtcagtgaaaaactgtcatcgaaatccgatattcccgtgctgatcgtaaaataattctttctgtaaagcagcttaatcaaaagctgctttttttacagctcccggctgttttttctttttttcggcattacaaaaaaactcgccatgatcaaaaaatcgatgcacaatacgacagaccagccctttaacagtccgctgagcgcttcggtgcgggaagcgtcctgaatgagaaataccgttccggctaaaagaacgccgccgatgacaaatgctaatacatgtcttccccatccttttgcataatgtttggcataatccagtccgtaccgcttgaccggttttgccccttcctttaccacataatagcggaaccgctcatccgcccactgaatcatgctttttccgaaggcgacagacactccgatataaacggccgccactgcatgcgccatagtcgccgccgcccctctgtataaatcagctgcggccgccagaaacagtacggcatccaatataggaatgagagcgaaaaaaaacattccgagcttttgccgcctgaatatatagcgcgccgccaatccgaagatgacagccgcccaaaaagcagcctcacaaatgacaatcaaccaagcaatcgcgttcaatccggttcccccttatcgttttctaaaatgcattgtatcactgctttttatttaatacaactgtattacaaaattgcaagaaaaaatatttcctgttacactggaaccatgcctaaaataatcgatcatgaaaaaagaagaaaacaaatagccgaagccacttggcggacgattttggagcggggaatggaaggagcgacagtgagaaacatcgcccaagaagcgggtctttctttaggcgcgctgaggcactatttcaccacccaggatgagcttttagggtatgcgatgacactcgtaaaagaaaaagcggccgccagaattaacgaagttgccatgaaagatctgccgccgaaagaaaaagcggtgcgtctgatgcttgaaattatcccgacagatgaagaaacgatggctgaaatggaggtgtggttcgctttcacagcttatgccagacataagggagaagagtttcaaccccagcaggacgggatcttggcatatatccgcggcctgattgactggctggatgaaaataagcttctgaaaccgaatcttgataaagaaaccgaagcggagaaaatgtacgctatcgccgacggattggcgctgcatgccatgcttgaacctgatcgtctttcaaaagagaagatctcccgtgtactcgttcagcatatcgaatctctttttatctgactggagcaaaaaggccggatgtgttccggcctttttttcagcttatgactgaacgccgagctcctgctgaatgtgcgactgaaaagcctcctgaatcgttttggctacaggtcccggcgatccgcttccgaccggttttccgtcaagggttacgatcgggattaattcagacgtggttgacgagatgaaaatttcatccgcatctctgagttcctcttcggtaagagccttctcccgcacctcaatcccgttttctttcatcagctctaacagtttcatccgcgtaatgccgtttaaaatcagctcatttgcaggatgcgtccggacggtgccgtttatgacggcgtatacattggatgaggttccttccgtgaccgccccgtcccttatcagcacggcttcataagcgcctgcttcataggctttttgttttatcatcacattatacagtaaattcagactcttaatgtcacacctcagccagcgtttgtcttccgccgtgatggcctgcgctccggctttttgttcattttccggttttttcactgaaaaggtgtatgccgtcgtctgcggctccaatccttcgtcatactggtgcttccgcggcgccttccctctcgtcgtctgtatatagaccccgccgtcaatgagtttgttttcctgtacgagcttttgcagatcccattctatgtcctctgcggagaacggcagggtgatgccgatttctgcggcgcttctgaaaagacgggcgatatgctcacgcagaccgaataaggcgccgttatacactctgatgacctcatacacaccgtcaccgaattgatatccgcggtcctcaatatcaactgccgcttcttcacgatcaatcaactggccgtttactaatgtcttcatgtaaaccctcctaatcgttatctgccgtgatgtgcattctcagctgttattgtcaactattctatcatactgaacgagccggctgcggagtttatttttttcttaaaatcttattattcgacatcttttctatgtcttttccagttttgttcctgtatacttgattcgacatacatatgctgttaacttatggcacttcgcaagcctccgctgttatcggcattatgcagaaacttatgctactggagagattgttatgcgcaacacaaaagaaggtgcttccccttctctgttttcattggcttttaaacttacgagtttagcagttttgtgcggactgcttctggtaatcgtcataatgggatattccgcttccgccgcaaaaaacaaacaggtcaccgtgaccgcaaacgggcagcttcgggatgaagcagaaagcctgcggctgaaaaatgattctcccgacgtcttaatgaaacatttgcagaaagagcgtgacccagggaaaaaaacggtatatttaaccttcgacgacgggccgtctccatatactgaacagctgttgaatgtattgaaggcaaatggcgcaaaggccactttttttatgcttgaaccgcggatgaaagcctataagcattccgtgcaaagagcgaagcaggaagggatcgcgctgggcctgcacggcgtgacgcacgataatcacctgttttatcaaacaccgacatcaccgctgaacgaaatgcagcagggacgcgatacgctcgagacaatcactggagtaaaaacggatcttgtccgcacgccttacggcagtaaaccctcattgacggatgcccagattaagaatctcgaaaaagacggattcgtgtactgggactggacgatagacagtgaagactggaagtacaaaaacgcgcggtacgtgccggaagtattgaatcagctcgcatatttggaaagcgttcatacgagcaggccgcatgtcattttaatgcacgatctgcctgcgacggtgcacgctttaccgagcctgatccaaaaactgaaagcccagggctactcctttgatgttctgacggatcaaatgattcccgtccatgaataagaaaagccggatctgtataggatccggctttttttatgtcgcggcgctgatccgttttgcaaattcaccgatcttctcatggatgacaagatcaaataaatggtcgcaatatgtcggctcaaggttaatgatcacttgcttcaaaccgggaatccggcccgcatcctcagggacaaaccttgccggcgccacttcaagcgaagtgccgatcacaagaagaagatcagctttatcaagcttttcataaagggtttcaaaatgctgaacgagatcgccgaacagcacgacatccgtctttaatacggtgccgcataccgcatgatcaccgacttcggccgtacattccggcacttcgtccttcagcagatgagaaagcccgtagcgcgctccgcagcgggggcatgcggcggtctgaattgaaccgtgaagctcatagacactgctgcttcccgctttcttatgcagtccgtcaatgttctgcgtgaaaatgtctacctgctttccccgcttttcaagatccgccaaatacgtatggccggcattcggctcatagcttccgctcattttcatctgaaagagctgtttgaatttaggccagaattcacgcggacggcgttcaaagtattccctgctcatcgcttccattctggaggtgtcttcggtccatataccgcccgccgaacgaaaatcgggaatgccggattccgtgctcattcccgctcccgtcagcaccaggatacgttcagcctgattgatcaatgttataaacgcttccactcttccaccgccttttctttttatcatatcatgaaaaaagaacggcgcctgttatgcccgttctttttctccggaatgatccttcacatgaaccggatcatcgtggctcttctgttttacgaatacattctggcccggataggcgaactccacgccttcctcagcaaaaatatcaataatccggcggttgatatcctgccgcacgtccaggctttccgcccagacgatggtctttgtgtaaaagttgaaaaacagattgtaatagctgtccgcaaacacgtcaaagttaaccataatcgtatcatcatgcacgccttcatgttcacgaagcatttccctgagccttgtgatgcaccgctctaaacgatcaatcggcgtcgcataagaaacacgaacggaaaacgtgacctggcgcttcgtcatcctcgtccagtttgtgatggcttccatggacagcgttgaattgggtacggtaacaagcgccccctgcgccgtgcggaaccttgtgcttcggaatgtgatatcttcaacgccccccgtcacagatgacgtctcgacccagtcgccgatcgtaaacggcttttccgtaatgatgataatgccgccgaaaaaattgctgatcgtatctttagccgcaagcgcgaaggccaagccgccaagtccgagtccggccacgaacccgtttacatcataattgaattcctgcgcgatcacactgacgctgagcgcgagaatgacaaagcgcagcaccttggataaaaacggcgccaaaatgtcatccatatcaagctcaaagcgctgattgactttatgaaataaaaacgaagacgccgatgtcagattgcaaagcccccaggcgatcagcgctatgatcaaagagcggtacatttttttgacaatgtccatctgcccgtctaaaaacggcgaatactcaatcgccaaaaacagacccagcgccacgaaaaaccatctggccggcttgtcaaacgctacggcaatctgtttgaatatgtcggttttcggcttgttcgccaatttgtaaatgagctgaaaaaagtatttgacaaacagttttctcaaaacgagaaaagccgctaaaattccgatgctgatactgatctgcaaaatatggtcaagagtaaaaaagctctgaaattgtgtcatcatggcatatgctcctttgtcttgtcgaaaatctattatactaaaacattcggacatcagcttgttttaatgtctttaggcagcctgaaaaaccccggcctcagagcacagccggggtttttcacacattcgttcatctttcagccagatacaacagggtcaggcactatttcttctttgattgtgtctgtttcaggagagtcgctttttggatttcagcatcggtttcggccttaattctttcttccactttcaatctcccttttcccatgatctcgcctcctttttgccattataaatcatcactgcggattgtaaaccgaaaaaagcactatctttattccaaaaaaatactgttttgcacattcaccagtttgaatcgctgtgcatatacgaatctgatataataacagaaatgcccatgaggggagctgacaagcttgtataccatcgctcatcgcggcgcatccggttacgcgcccgaaaatacatttgcggcatttgatatcgctgccgaaatgaacgctgatttcattgagcttgacgtccagctcacaaaagacggccagattgtcgtcatccatgatgacaaagtcgaccggacgacggacggctccggttttgtaaaagattttacgctgaagaagctgcagtctctggacgccggcagctggtatggggctgagtttaaaggggagcggattcccctgctcgaagaggttctgaagcgttatcattctgaaatcggatttttaattgaactgaaagggcacgtttctcaagtcggtcttgaaaaagcagtcggccagctgttaagcaggtttaccttttccattcaccctatcgttcaatcattcagtctcaagtcgattcagacctttcacgacatgtatccgtccgttccgactgcaattatcgcaagacccagcttcgggatgttttccaaaagccagctggccgcttacaaatcagccgcaaattatgtcaatattaaatatacccgcctgaatcggttcttgatttccaccgctcacaaacacggcctgaaagtatttgcctggacggtcagaaatcacaagacggccgaaaagctgcaaatgatggcagttgacggcattgtaactgattttccggatattatttctaaggatggctgatatgaaacaatacatcgcaatttttatcggaggcgcgcttggcgcattgctccgctttgaaatgagcgcgcacattcacagcggaactttcccgggtgccactttcctcgaaaacgcggcgggaagccttttactcggtcttattacgggttatttcatcattcgggctaaacgccctcttttgaccgcctttttaggaaccggtttttgcggaggtttcacgacgatgtcaaccttcgcaaaagaaaccatttttctgctgcaatcgtctcccgcagcggctttttgttatgctgccgcgactttattcgctggtcttgctcttgcatacgccggcatttttttgggacggcggattgcccttcacgcagccggaagggggcatgatacgccatgacgattgtcctgatgcttatcgcggcgggtatcggagcggtattacggtctctgctgggtaagacaatttcagaaagaacaaaaggttttccgattccgcttggaatggctgcggtcaacctgctcggctccttcagcctcggcatattcaccggcttgggtctggataatccttctgccggcgtcatcatcgcgacgggctttttcggtgcgtttacgaccttttccaccttcagtattgaagccgtgcagctgatgatgaacaaccgcataaaggaaagcctgctctacatcgctgtttcagcagccggaagccttttggcgttctggtgcggctttgttatgatatccatttaaaaaaaccttgagcttatttttcgctcaaggttgcgttatgaagcatgaccgtttccggcacgggcagcgggcggtttattgtcccctgaccgcccgggcggccctgttcttctttgagttcaagctgtttaataaaccggccgtccatttctaatatgagggcagtgtatcccccgatttgtatcgactcacccgcacaaatgtcaatattccgtttcagcacaagaccgccgatcgtgtcgacttcctcttcaatctctgcgccgagaagatgattcacctgatcgatccgaacctttccgtccagcacataatggcgttcggacagcttttgaatctgcggctgttcgtcctcatcaaattcgtctctgatatcgccgacgatttcttcaagtatgtcttcggtcgtcacaagaccggacgttccgccgtattcatcagacaatatcgccaaatgaatccgttctctctgcatttttatcagcaggtcgtgtatcgggatcgtctcgatgacttcaatcaccgggcggacgtaagacatgatggatacttccgctttttcatcttctgtcataaacagcagatctgaaaagagatgcttcgtattgatcatgccgatgacactgtctttgtccccgtccgttacgggccagcgcgtatatttgtctttcagcatcatatcaagcatttccggcacgtccatatcagtggaaacagccgcgatttcttttctcgggatcatgatttccttggcgatccgattatcaaaatcaaaaattttattcacaaatgtatattcagacggattgatttctccgttttttaaactttctgacagcaggatccgcagctcttcttcagagtgggagccttcatgctcagatgccggctttaatccggccaaaccggtcagaattctcgcggagccgttcagcacccaaataaacgggaacatgaacacgtaaaataaccgaagcggtccggcaatccataacgtcagcttttccgctttttgaatcgcaaccgttttaggcgcaagctcaccgacgacgacatgtaaaaacgtaatcagcccgtacgccgcagcaaaagcaatcacatgctcggcagaatccggcagccccataccctgaaacacaggatgaagcatccgctcaaatgcaggctctcccagtacgccgagcccgatggatgtgagtgtaatgccaagctgcgaggcggataaatactcatcaagatccgtaatgatacgctttgcgagcaccgcccgtctgtttccttctgagatgagctgatcgattctggatctcctcactctgacgatcgcaaattcactcgccacgaaaaatgccgttaacgcaatgagcacaccgattaaaatcaaactgtcaatatcgtccatttcaccttatcccgaattgaaggataaggacgtcacctcctgatttcatcgttttttcttaagcgagaggaacgaaatgggtgattgactacacagagggccccatcctgccacctcctaagtcaaagcatgattgtcatttgtatagtttattgtatcacaactccattctttcatcattttcagatttttcatcatataaaaacagccttcaaaaagaaggctgccgttatctgcttcggaaatgattttctaaacaaagcgccgtattaatcccccgaatcccatgcttaagcttaacgcatggtgtacggtatgggcgctcggcccgtcggtcacccactgaaatgaatcgtcaatcggctccgttaagtttcggatcggatgaagcttgttttcccgcatttgcaagagaacagcaatgatttccaccgttccggccgcactcagaccgtgtccggtaatcgattttgtcgcattaatccgcgcgtgcgacaggccgctttcagaaagcgcccggcattcagtcttatctccgatcggcgaaccggtgccgtgcgggttgatgtaatcgatctctttcgctgaaagaccggcccgctccagcgcctggcggatcaccgtcatttcgccctctgctgaaggattcgggttgcggttcgcatcggaagccatcccccagccctttaagccggcccacgatcgtgcgcccctctcttcggcagattcagcgcgctccagcacaatcgccccgcacgcctctccgaatataaacccgtccgtatgccggtcaaacgggcggcaggcggcttcaggccgttcagcgtatgtatcagtgcccatcgctcccaaagaacggagagcgtgacactccatgtacgacagatcggccagcgccccgatcacgatgcaccggtcaaacaggcctcctttaattccttgagcagcctggataaccgccgcctggccgcttgccgacgcgccgccgaccgtaaaggccggcccttttatcccgaattgctccgtgcaaagccccgacaaatcactatccataaaagaaagcccgtatgtcggatttacaaattgcggcgtttcaccgtttttctcaaaggcctgcagcaattcgcgctgcgtcatattcgacccgccgatgatcagaccggtgcggctgtgatcagcgccgtctaattgagcgtcatgccacgcttcatataaagcgataagcgccgtctttcctgataatgcggcccttcggtacaagcgcttcgacagcgcgtccggcggcgttaattcgctaagctccgcgccgataaacgaactgcctttctgccggccgggacgtttcatcacatcaaaggcgtgccgcccctccatgagcgcatcgagaaacgcctccttgccttgtccgaccgcggttaagactccgattcctgtaatgctgatgtctgatgtgccattatttctcctcgacatttgtccgttctcccatctttatgtgttggaagctatgaagaaaaatcttgatacagtgctttgaaaatatcgcgcgactgtctgatctgttccgaaggcacgctgaaagataatcggaaatagccgctttttccaaatccgctgccgggtacgatcaatagtctgtatttctgtgcggcatgcatacagaacgccacctcgtcttcaatcggtgatttcggaaagacgaaaaagcctcctttcggcatttcaaattcgaagccggcttctgtgaggatgtccaccataaggtctctccgctttctgtaaggttcagcgtcaatcgaaagatcatccattttcgccacggcgcgctgcatcatgaccggagcgttcacaaagccgagcgtccggttgcagaaaacgaacgcatccgtcagaagatcgccctcaggcatttgggcgtccgccgcgatatacccgagcctttcccccgcaatgccgagatctttactgaacgaactgactaaaatcacgcggtgatacgcctgaaacggattcgcctgctcttctccgtagatcagctggctgtacggttcatcaaataaaataaatatgctttggccgttccgctcttcggcttcttttaataaggcgcctaattcgttaaggtttttctggctgagcacagtccccgtcggattatgcggcgtattaacgatcagtcctttcgtacggggtgtgatcgcacctttaaccgcttcaatatcaatctcaaatgagtcagtcagcgggcagatgacgggtctgccgcggtaattttcaacatacgctttatattccgcaaaataaggcgaaagaaggatgacttcttcctccgggtttaaaatgctcttcagcgcgacattcagcgccccgccggctccgaccgtcataactgtatgcctggcggaaatctcggtctgaaaccgctctgacaaaaagcgggcaaccttttctctcgcctccggaagcccttggttttgtatgtatccgtgccgccctgtttcagccgcttcgcaaagcgcctttttaaacgtttcaggcggctccgcaaccggatttcctattgaaaagtcaaacaccttatcggcgccgaactcttttttcagccgagcgccttcatcaaatagtttgcgtatccatgaacctttctccaggttctgtgtcacttcccttgataaaccggccactgtcatctgtcccttctgtctttttctgccgtttctatttacaatgattatgaaagatttacatggcgcagtcaacgctttttcagacagcctgccgccccgtttcaggagaaagacggaaaacaataaacttgtgcaaactccccttcatatattaaactattctcataactataacgtgatggttggggagggatttagatggggctgagacttatcgcatcagtgaattagcagagcttgccggtgtaacgaaacgcacggtggattactacacaaacctcgggcttttaaagcctgacaggtcttgttcgaactatcgttactacgatacacttgcacttaatcggttaaagtttatagtcgcttgtaaaaagcagcgattggccctgtctgatataaaagatcgactggagaaccagtttccctcttcagccctgcctgacgatgttggaaatctggcatcggaaattgatcacatgaatcaaaacatctccgggatcttgaatcggtttgaaaagcttgaaccagaggagcgcgcccagctgaaaaaaaggctggctcctgaaaagcttgcagtgcttcaatcatttatgctgctgttaagttaaaccattatcttactaacaggaggtgttaccttcatcttcccaaaaggagtgaaggttctaattggacattgtgaatttgattttagtcgcggttttaatcgcgctgacggcatttttcgtagcatctgagtttgcgataatcagaatcagaggctcacgggttgaccagcttatagcagaaggaaataaagccgcaatcggtgtcaaaaaagtgaccacgcatttagatgagtatttatcggcgtgccagctcggcataacattgacttccatcggtcttggtgtcttaggcgaatcaacgattgaacgcttgcttcacccgcttttcacaaagataaacgtaccaagctcattatcgcatattatttcatttattctcgcctacgcgatcattacattcttacacgtggtcgtgggagaattggcgccgaaaacagtcgccatccagaaagcggaagccgtttcaatgctgttttcgaaaccgctcatttggttttaccgcatcatgttcccgtttatctggcttctgaacaactccgcccgtcttttaacgaagacgttcggtctggagacggtgtctgaaaatgagcttgcccactctgaagaagagctgcgcatcattttatcggaaagctataaaagcggtgaaatcaaccagtctgaatttaaatatgtgaacaaaatctttgaatttgacgacagacttgcaaaagaaatcatgattccgcgtacggaaatcgtcagtctgccgcatgatatcaaaatttctgaaatgatggatatcattcagattgaaaaatatacccggtaccctgtcgaagagggtgacaaagataatattatcggcgttattaacattaaagaagtgctgaccgcctgcatcagcggcgaagtatcagtcgactcgccgattacggattttgtcaatccgatcatccatgtgattgagtcggcaccgattcacgatctgcttgtaaaaatgcagaaggaacgggttcatatggcgattctgtcggatgaatacggcggaaccgcggggcttgtcaccgttgaagacattattgaagaaatcgtcggggaaatccgtgatgaatttgatatcgatgaaatcaatgaaatccgcaaactcggcgacggccattacatgcttgacggcaaggtcctgattgatcaagtgaacgaactcctcggcatccatttggaaaatgacgaggtcgacaccatcggcggctggttccttacccagaaatacgacgtcgaacaatacgactcgattatcgaagaaggctgcgaatttatcattaatgaaattgacggccaccacgtcgcatatatcgaagtgaaaaaactggcgtttgatgaactgctggaaactgccgaacaaaaagaagcataacaaaaaagcttgcgcgtctgatacagacggcaagctttttttcatttacagttgttcaagttttttctcaagctctttaattctggcattcagctcttctgtcatggccgcaagcctctccttcggcgcaagatcggaaaagtcctccaaaaaaatcggctcgccgatgataagccgcatttttccctttttaaacagcgcttttcccgtagacggccctttatatgcggccggaacgagcggcgctttccccatttgggcgatggtcacggcccctcttttcagcgggacgtcttcagaagttctcgtgccgctcggaaaaatccctacaatcttcccttccttcagaagcttaatcggcgttttaatgctgctcggacccggattttcacgatcaaccggaaacgcgtgaatcttctttaaaaaacttccgatccactttttctgaaacagctcttttttcgccatataatgaatctgatggggcaatatcccgacaccgagcgtgaggacgtccacccagcccgcatgcgtgcacgcgataacgaatcctttatcagacggaagattctctttattgtatactttgactcctccgcgcagagaaagaatgaatttgatggcatttgcacaaaacttatacataacgcacttcctttgttgtaatgatcaaaagtgttctctctctattataacaatattttttattacctggtactaataaatatatttttcctccgccgatctctatcttttatgacggattttgggtactatagagaaatggtgtttgatgaggtgaaaatgaatttaagccgtttgcatggaacgtgcaactttaaacctttcttatgcgtgtataacatagaggggagaaaaggcagtgacgatcgatgaaatttaccaaatgtatatgaatgatgtttaccggttcctgctctccatgacaaaagacaagcatctcgctgaagatttgctgcaggaaacctttatgagggcatacatacacattcactcctacgaccacagcaaagtaaagccatggctttttcaagtggcgagaaatgcgtttatagattatgtcagaaaacataaaaaggaagtgaccatttccgatgacttaattgggagcctttttcagacggctgttcaaagcccggctcatcagattgaaatcaaggaagtgctgacagggtatatgtccgaacttcccgacaattatcgggaggccttaacactgtattatttaaaagaactgaattacaaagaagcatcccatattatgaatatttcagaggctaattttaaaagtgttttatttcgtgccagacagcggctgaaagcactttataatagaggtgttaatgatgaatgaagaatttaaaaagcgtttttaccaatacaaaaatggagaaatgagcgaccgggaaatggccgcctttgaagaagagctggaaaagcttgaagtctatcaggagttgattgaaagcgaaatgcaggacgaccgggaatgggacgtcggcatcagcccggaaaaacagaaggccattttgtcatacggaaaacgcaaatcgtatttgcggatttcagttctcgccgtcatctccaccttgatgattttgccgctttgcactttgggaagctacctctattacggtttgggaggaaaagaaagcaccggcaatcaattaatggaaaccgcagccgtgacggtggcgaccaccatgccgaacgtactcgtcgatacctccggactgaaaagccaggtgaagctgtttgggatgaatacagagtttccgctgcaaaagcagatcggcacaaaaacgaaatccgtcggcggagaacggattgaaatgtttttagatacggtcaaatcgcctgccgttaactactatgatctagacgcggcacaggcaaagcattattttgcccatccttccggcttaaaggaacgcacgattgacaaagccggacagacattaaaaaaattgcctgaaggaagcgtggcggaggtctatctttcttatgaccgggcctatccttcttctcaagtatattctacttttaaaaaatacgatgtgaagtttttatggaacgcggtcgaaacggagaaaaatctgaaagacagtccttatgccgagccgttaggatttcccgggaaagattccaagatggtgtcctctttcgaaacgcaaggacagacagaccgtgaacaatttatcaatgcccttgaatttatgtcccgccataaaaaatgggcgcatgcaatatcgaaacgcaaagacatgaatcttggcagccgaatcgactatgttgaacatcacggaatgaacgtatacggctctgtcgtgacggggccgacaaaagaaatcgaacgtctgctgaaaaataaaacagtaaaagcagcaaacatcggtgaggtggaattatggaattggtaagaatttttaaagagcataatgttttcggctggatatcagtcggtaccgcgattttgtcgctgctgcttttgaacgtggcaatcatcagcaatgtgactttctattcttatcagatgctgccgtttgcgatggccgccgtgccgttcggcatcattgagctgtttattaaaaaaggacggacgggcccgggactgctcggtgtcatcctcaaccttttcgtcattgtttgtgtatatacgatcgttgccgttgatacgaatctgcaattcggtttttaaacataaaaacaggcccttttacaggggcctgtttttttaaaatgaaagaacgccgattaaatgcagcaatacgacgatgatagccagcggcacgaggtatttcagaaggaaataccacacctgaaagaaacgatagccgatggcggaaccgcttttcatctcggcgaacagctcccgcttcggtattttcagcgggatgaagattgatattaataaagcgccgagcggaatcagcacattgctcactgtgaaatccgctagatcaaaaaacgtttttccgaacaaatgaacatcaccgagcacaccgtatgataaacacgacggaattccgactaagaaaatgagcagaccgcttgtccacgacagcttcttccttttcgtttcatcacctttcccgacagtcgctacgataatttccaccatcgaaaaggccgaagtcagcgcggcaaagaaaaagaccgccagaaagctgataaaaaacagcgagccgaacggcagccggtcaaacacagccggcagtacggtaaacagcagtgtaggcccttcatccggtttaaatccgaacgaaaaaaccgccggaaaaatggccagtcccgcaaacagcgtgacgagcacattcatcacaacaatggaacccgccgatcccggaaggttttgggttttcggcagatacgaactgtatgtcaccatgaccgaaacgccgagcgttaatgtaaagaacgcctgtcctaaagcatataggatggattccggcgtcaaatcttcaaagtgcggaaccaataaaaatctaatcccctcaacggcatgatcgagcgtgactgatcgcagcaccagcaatagaaacagcacgaataaaaccggcatcagcaccgcactgacacgttcaatccctttctgcacgccttttgcgacgaccgccactgtcaagatcataaatacaagctgcgcggcgagagtctggatcggattttcaatgaccgtcccgaacaccgttccgtactgctcctgagtgagcccggataaagaacccgtaacagcttttaacacataaagcaaaatccacccgccgacaacactgtaaaaagacaaaactaaaaaacaggccgccacacccacataacccgtgaggtgccataccgacttcggcgcggcttgtttgtaggcatcaatcgcatttgtctggctccgtcttccgaaaataaattcaccgagcaaaagcggatagcctaaaagcacggtaaagaggacgaatacaagaaaaaaagcgcctcctccgttcgtacccgctacgtaagggaacttccaaatggctcccaggccgatcgccgaaccggcagcggccataataaatcctatttttgaggcccattgaacccttttttggtcagacacgactttccacttcccttccgccctatattatcccttattcactgcgataacttaagcccatttcaatatgtttcattattccgaaaaataaaaaggagcggcgggtgccgctccttacaaatccccgtttaatttcgaatgctttctcgaatataagaaataaatcaccagaccgatgatcagccagataaagaaacggaatatggtggtggcgccaaggttaataatcaaaaatacgcagaacagaatggacaatatcggaataaagggaacccccggacatttaaaagctctcggcagatcaggctgtttctttctcaatacgataaccgccactgaaatcaggacaaacgcggcaagcgtgccgatgttcaccagcttcgccagctcatcaagcgggacgagcgagccgagtaatgccgacaggatgccgaacacccatgtcaccacgtgcggcgttttatgcttcggatggacttttgaaagcgcccccggcaccaaaccgtcacgggacatggcaaacatcaccctcgtctggccgtacagcatgacgagcatcaccgttgtcattcccaacactgcaccgatatcaataatcccggccacccaattctgtccggccatctgcaggacgagagacacgggatggtcaacgccttcaaagcgggcaaacggaacgacgcccgtcataatcgccgatacggtcacatacagcacggtgcagacgattaatgaaaagataattcctttcggcagatccttcgccggatttttcgtttcttcagcggcggaagagacggcgtcaaaaccgataaaagagaagaaaacgagcgccgcggcactgaaaacaccgccgaaccccatcggtataaacggctgccagttgtgaggtttgacatatacggccgcaacggcgataaacaatagaacaaccagaaccttcaaaatgaccataatattattgacccgcttcgattccttaatgcctaagtagaggaggaatgtaatcgcaagcacgataacaaatgcggggagattaaagaatgtgaccgtgcctttaatggatcccggcgcggccgttaatgcggtcggaagatgaatgccgaagcccgccaagaatgattgaaaatagccggaccagccgaccgaaaccgcgctgacggcgagcatatattccaagattaaatcccatccgatgataaatgcgagaagttcacccagtgtcgcataagtaaacgtgtagacggaaccggaaaccgggacgcttgaagcaaattcggcatatgacaaagccgcaaataaacacgcaagagcggcgatgacaaatgaaacggtcagccccggccccgccgtgacagcgcctgttccggttaatacaaaaattcccgttccgatgatggcccctatccccagaagtgtcaaatcaaaggcccctaactctcttttcagcgacttttccccgcccgttgcggcaagcaggtcctgaatgcttttctttctgaatatgctccccttcatctgcttcactccttgtaaatcaatatatgttagaatattcagacaacaatagcaataatgactaaattcttatttttcgcatgaaatgtttcagcacatcattcctttctcctacaccatattatagcgaaaaatataaaaatgaaaataacttttttgaaaattctatatattatttcagttttcataaaacagaactcagcggattctccgctgttaaatattaacattagtaattcagctggcggcttctattttttaaaaatcgtattcatatgtaatcaaataaaaatcccgccctttttaaaagcgcgggataagacttgcttattatgttgaaataaacctgcctccatttacgtgaatggtctgcccagtcatataggaagattcgtctgaagccagaagcacataagctcctgcgtgttccgcaggctgtcctggtcttcccatcggagtgtccagaccgtgcttttccaccttttcttcagtaaacgttgccggaatcagggcggtccagatcggcccgggtgccaccgcatttactctgatcccctgatcggccaatgacatcgccattgaacgcgtaaaggaaacgatgccgcctttcgtgcacgaatagtcgatcaatgatgtgtctccctgataagcggtaatcgacgttgtattaatgatggcgctccctcttttgagatgaggcagcacggcttttgtcatatgaaacatggaaaacatgtttgtacggaatgtcttctccagctgttcagccgtaatatcaagaatcccgttttgcggatgctgctcagccgcattattaacgagaatatctatttttccgtagtgatctaagacttgctggaccgccttctgacaatgcgcctcatcaccgacgtctcccggaattaacaggcaatcggcctggtattctctcgcacgctttttcgttctctcggcatcggcatgttcgtctaggtacaggatggcaagatccgccccttccttcgcgtaagcgatcgcagccgctgcgccgatgccgctgtctccgcccgtaataacggcgacttttccttttaatctgcccgacccttttacatccggatcctccaagagcggttttggctccatgtctgactcaatgccgggctggcggttttgcacctgcggcttttgtccttccgtctgtctgtccatcggattcatattctcacactcctgcaattggtattactgagacgataccacgcagtgcggggagttaaacggacaaatatgccggtaattaaagctgctgagccgtttcgggaaaagcgccggtgtatttcgcagacggtctgtaaatcatgttgtcagcggactgttcaagcacatgtgcgcaccagcctgccattctgcttgctgaaaaggtcggcgtaaataaatcattgtcgacatcaatggcctgcatcacagccgctgcgtaaaactccacattcgtatacagcttccgtccgggcttatattgctctaacaagcggatggcttccttctccacataaagcgccaagtcaagcgacggatcatttcccgccacttcttcagcctttatgcgcagcgcttccgcccgcgggtctttcgttttgtacaccctgtgcccgaagcccatcaggcgttctcccctcataagcttcgctgtcaaatacgcttctgcattttctttttccccgatgtcttcaagcattttcgtgacgcctgaaggcgcgcctccgtgcagcggccctttcatcgtacccagtgcggcagtgacggcagacactaagtccgattcagtcgaaaccgtgactctcgctgaaaaagtcgatgcattcatcccgtgttccatcgccagaatcatatacgtctcaagcgctttcttttgggctgcggacggctgcctgcctgtcagcatatacaaatagttttcaacgtgtccgtatcgcgcctcgggtgacagcgcttcctgcccttgtttacggcggtatctgtacgcaataatcgtcggtgtgacggcaatcagtttaatcgcttcttccggcttgggcggatatgtaaatgaatctgtgcccaaacctgaaacagccgttctcagcaccgccatgtcgtccatttcatccggaagcgtttccagtaagccgatcaaatgtttcggaagcccgcgctcggctgcaagttcttcctgaaacgcaagcaattgccgctcatcaggaagcgccccgttcaaaatgagatacgccgcttcttcaaaactgaattgcaatgcgatatccttcgcgtcatagccgcgatatattaaatgccccttttctccgtcaatgtggctgatcgccgtttctgcacaagtaatccctttcaatccacgataaatcaatttcattcccccttatcctctttctgttattatagtaaatataatatttaaaaaataatgaatatttttaagggaattaattaaaacttttaatcagaggagtgcatctatggattttaaatggcttcacaccttcgtcaccgcggcaaaatacgagaatttcagaaaaacggcggaaacgctttttttatctcagccgaccgtcaccgttcatataaaattattagagaaagaaatcagctgcaagctgtttcagcggagcggccggaaaatacaattgacggaagaaggaaaagcatacgtgccgtttgccatgagacttttggaagactatgaaaacagcatggcggagctgcacagggtgcgccagggctactcgcacacgctgacactcgctgtttcgccgcttatcgccgacaccgttctcccgtctgtcatgaagcgttatacagaggacaataaagaaaccgaaatgacggtcaccattttcgaatcggaagaaatcgcctctcaaatcagaaacggctcagccgatatcggactgagctgcttaaaggtgcaatcatcttccctcacttgcctccccctgtacaatgaccccgttgtcctcgtcgcgccacccggccgaaaacccgggacagggaaggcggatgaagtgaaagacctgttcggacaatatctgcttttgacccataaccatcctgactattgggatgatttgctccgccaggtcagaatacagttccctttcgtcaggacaatgaaggtgacacagacgcatattacgaaacgatttattaaagaggggctgggcgtctcatttctgccgctgtcagcggtacggtccgaactcgccgcaggcagcatgattgaaattccgtgcgaattcgcccagatgccgagcgcgggcgcgtacgccatcgccctctatgaaaatgaaaaaaagaaaacctttttagattttttatcacattttcatttttaggtgaaacaaatggagctctgccccgtctaaataaaaaacccgttcggatgaacgggtttctctcactgctagaatcttttcgcgcccaggtagcgcggtttccagtagctgttattcagatcacttgttgtgacgccgtcagaaccggcatggatgaacttgttgtttccgatgtatacacccatgtgtgaaggaccggcttgatatgttgtaaagaagacgaagtctcctcttgacgggctggatacgctcttcattgagctccagtatcccgcagtgcttgttctgccgacactcgtctgtttgtttaacaggtaccagataaatccgctgcagtcaaagccggaagtcgttgttccgccccatacatacggcgtgccgattaaagattgcgcatcagaaaccagcttgtttacattcaggctcgtctgtgcaatattatggctggatgaaggcttctttgatgacgaagatcctgaagacgctgaaccggaagttgatccttttactttaagcacttgtccgatgcggatcaggtccgtttttaaaccgtttaaactttttaattggtttaccgtcattttatatttattcgcaattttccaaaggctgtcgccttttacgactttatatgtagacgatgatgacttgctgcccgaatttgaacctgaagatgatttaccgttgatcgaaagcgtctgaccgatgtaaatgatatccgattttaatttgttctcagatttaatggaattaattgacgttccataccgatttgaaagtccccataatgtatcgcctttttttaccttaatcgtttgcgcagacgccgcgcccgcaaacaaagtcgtccccaaaaccactgccgttgttgctgtaacaagttgctttttcatattttcctccctgaatgattctatctattttatgtgtctcttttttaaagtttttatctgtttcctattataaggttcaatttccactagaaatagacttgacttcccgtgacaaatttcttactaattcgtttttgaaaaaagtttttaagggtattaaatatttcaatttgatttcaaacgtgacgaaaaacgagtcaatttgtcatgtttttttcctgtgatcctcgtattttggaaaaacaaagcagtttactttccaaataactccttgttaaaaaaatcctcgtctttttcaaaaaagtgaatggttttcactctttcttgaaaacataagttacaccggaatttacatttctaacaatgtttcacctgaaatttacaggaggaacaggcgctctttacaaacaccccctaccattagacatgcagacacgattaaaggaggacgagtgagaatgagtctatttaaacaggttcgatcaaaacttctgccggcggcagccgtatccgtgctgacagccggtctgattgcgggcgcggggtttcagcactctgaacaggctgcggcaaaaaaacagcctgacaaaaacgagatcagaaacgtcatcttcatggtcggcgacggaatgggcgcaccctatatgaacgcctaccgttcggtcattaacaaaggaaagccttcggatggtatgaaactgacggcattcgaccccaatctcgccggtatgatgatgacttatcctgacgatcctgattccaatattaccgattccgcggcggctggcacggcaatggccacgggcgtgaaaacgtataacgcggcgatcggagtcgataaaaaaggaaagcgggtcaaatccgtcctcgaagaagcgaaacaaagagggaaatccaccggacttgtcgcaacttcggagattgcccacgccacccctgcggcattcggagcccataacaaatcccgaaagaacatggatgagatcgcaagcagctactttgatgaccgcatcaacggaaaacaaaaagtcgatgtgctcctcggaggcggcaaatcaaactttatccgtaaagaccgcaatgtaacaaaggatttcaaaaaagcgggatacagctacgtgacatcaaaacaggagctgaaaaaggaccgtaacaagaagattctcggcctgtttgccgatggcggactcgacaaagcaatcgaccggtcaaacgctgtcccttcattagaagacatgacaacggcggcgatcgacaggctgaacaaaaataaaaaagggttcttcttaatggtcgaaggaagccaaatagactgggcgggacatgacaatgatatagtcggcgcaatgagtgaaatgaaggattttgaaaaagcgtataaagcagcgatcgcatttgccaaaaaggacaaacatacgcttgtcgttgccacggctgatcataccaccggcggattgacgatcggcgcgaatgacgataaaaactggcatgttgaaccgattcttgccgccaaaaaaaccccggcatttatggctgaccaaatcaaagcgggcaaatccgtatcttccgtgcttgcgcgttatacagacctgaaatggtcaaaagcggaaattaaacagatcgaaacggccgcaaaacaggatgctgacaagagcgtctacaaagcgatcattaagctttttaatgcgaaaacaaacagcggctggacaaccggcgatcatacgggcgaagaagttcccgtttacgcatacggtccgggaagagagtcatttacggggcttttaaacaacacggaccaggccaaaaagatctttcacatcctgaaacacggaaaataaaaaaggatgcggggatttccccgcatcctttcttcttttacaaatatctccggtgcactcctttgccgtcatacgaaaacatcacttctctgtcttcaagaacagattcgatgtgcacgctcctgccccacagctggtacagatacggcagcactttctccaaatatttcagatcaagctcaattccctcataccaatgtttaatataaagctcattattcttcaggtaatccccgtcattgacggtcagataaggaaatcccccgttgacccgcatgttcacgagctggtcgcgcacggccttccattctttgtcgatcactttatagtccctgccctgcttttggaataaatacaaatcctcacgcataacgagatctttcgtcaaataattgcggataaatgatatgtccgattcaatttccctgacctcaaacattttctcgcggccggaaccgggctttacccctgtttttttcatttcatctgtcgggttgtcataacgctcttcgatgtcttcaaaaattttcagccctaaataatacgggttgattcccgtttttgacggctgaacgacgcctgcgttcagcttcgcaaattcgatggcttcatctgaagtcaggtcaagctcgcggataatccgctgatgccaataggatgcccagccttcgttcatgattttcgtttccagctgaggccagaaatacagcatttcttctctcatcatggttaaaatgtcacgctgccacggttcaagctcccgcgaatgttcctcgataaacagcagaatatctttttccggacggggcggaaacggttttttccctcttttctttttcacctgtttcggcttatccattccccataaatcatcgtaaggcgatggcgcggtttcttcttcgtcctcctcttcgtcatcgacgctccacagcagcttcggcctgacgagcgacggatcgatatgctcctgaatcgccagaatggcatctaaaaaggactccacctcttttatcccgtgaattctttcataatgcttaatccgctccgccgcagccgccatactctcaaccatgtcccggttcgtattttgaaagcggcagttatttttgaaaaaatcacaatgggcaagaacatgggctacaattaatttattttggatcagcgaattgctgtccagcaaaaaagcgtagcaagggttggaattaatgacaagttcataaattttgctcaaaccgagatcataatggagtttcatcttatgaaattgtttgccgaaactccagtggctgaatctcgtcggcatgccgtacgcgccgaatgtataaataatttcagccgggcaaatttcatatctcatcgggtagaaatcaaggccgaaaccctttgcaatgtcggttatttcctcaattgcccgctgtaaaccttttgtctcctccgcgttcaagcgaatcccccctacttggacttatttataatgtatgacccctcctctcaaaagatgaaataacagaccggtttccgactgaaaactttcggcacatccgccctgtttgctttatatgtaagtgggtaaaacacacaccataccccaaaaagaaaaggagcgattctacttgaatacagcagacatgcttacgacgtatctcagcaaactcccgaatctgatcattgcactgctcgtcctgcttatcggctggggcattgccaaaatcattgaaaaagccgtatacaaaggcctgcaaaaaacaaaaatcgacgacaggctgttcgccgaaaaaaagccggcgcgctattcctcagaaaaagtcatcagtaaagtcatttattttatcgcattaatcatcgtttttattctattctttaacattctgcatctgacaaccgtggcttcgccttttgtcagcatgctgtcggcgataacggcggctgtgccgagcgttttaaaagccggcttgattctgctcgtgggctgggcggccgcttcgcttttcagctatctcgtcaaaaaagcgggcatgaaactcgctgaaaacggccggctcagaaaatggacaatggtgtctgaagaagcggagatgagcagatccgttacggccgcttcacgaatcgttttttacttcgtcttgctcttgttcctgcccggcgtcttgtccgctctccagatcagcggagtgtcagggccgtttacaaatatgattcaaagcgttttgtcctttataccgaaattattcgccgcggcgctgattgttttaatcggctggcttgttgcccgtctcgtccgtgatatcgtcacaaactttctggcgagtatcggaacggaaaggctcgccgcacgtatggggctttctatttatctgaaggatacgagcctgtcggcaatcatcggaacgattgtctacgtgctgattttcattccggtgatcatctctgcgcttgaccggcttgatgtggcgggtatttctgaaccggcgtcagccatgctgcacacggtcttcacaatgctccctaatatcatcatcggtattgtgctgatcatcgccggcatctgggtcggaaaatgggtcagcagcattgtatccgggctcctgcaccgggccggtttcgactctcttctcggtaaaatgggctttgaacaggcgggcaccccgaagctgacgctttctcagacggtcggcatgattgttcagatcatcatcgtcctgctctttacggcagaggcgctgcagcttgttcatctcgaatttctcgtcgttatcgcaaccggtattatcgcttacctgcctaatgttctggccgctgtatttattctcggaatcggacttttggccggacagcttgtcagcaggctgcttgccggcatgctgagcggaaaggaattcagattcctggcgccgcttgcgaaatataccattatcactctctcaatctttatggcgctggatcagctcggtgtcgccgacacgatcgtaaatgccgcgtttattctgattctgggcggtttcgcgcttgccttcggactttcattcggtcttggcggaaaagaatttgcctcccgttatctcgcaaaattggatcgcaaaattgaaaaacatcaatcggctgacgatcgtaagccgccgatgtcttaacgaaaaaaacgtgtgctcagaaggagcgcacgttttttttgagttaagggggcaaattccttttttttcattttagattcatatatgatagactgtaacagaagcaaaatctcttttttcgaggtcattctatgaaattaacgaactataccgattactctttacgcgttttgatttttttggcttccagacattccgacgaactttccaacataaaagaaatcgcagatacttattccatctctaaaaaccacctcatgaaagtcatttaccgtctcggccagctcggatatgtcgaaacgatccggggccggggaggcggaattcgattaggaatgacaccggaagacataaacattggagaagtcgttcgacatacagaagacgactttaacatcgtagaatgctttgactccaaaaaaaatctctgtatcatatctcccgcctgcaacttaaagaaccttctgaatgaagccctgcaagcttacctggccgttttagacaaatatacgttaagggatctggtcaaaaacaaagaggagattatgagactgctcagaagctgaaggaatgtccgcattccttctttttttatgccggcataagaaaaaaggactatttctattaatatgataaacgattgcagacaagtgccgatataaagattatcattactgatatcctcaccttgcggctgcaacgaatggggatagaaaaattatcgcaggaaaagggagattcactatgaaaaaaaaggtagcggtcggtttgactgcatctgcgatcgtcgggtctgcgttagctgtaacaccggcagaagcacaaacgattaaggtcaaaagcggagattcattatggaagcttgcccaaaactacaatacaagcgtggatgccattacatcagcgaatcatctaaaatccaccgttctttctatcgggcagacgctcaacattcctaacggcaaatcagattccggcagcaaaaagccatcttcaaagaacagcggcacgactaaaagcgtctatacagtgaaaagcggagactcgctgtggctgatcgcatctgattttaaaatgtccgtacaggaactgaaaaaattgaacggtctgacaagcgacttaatccgcgccggacagaagctgcaagtgacggggaaagtttcctcaagcaccgatcagaaaaaaaccgctcctggcagcagctcaaacagcagcaaaaagcagtcatcatcttccgggacctataaagtaaaactcggcgattcactatggaaaatcgcaaacagcgtcaatatgaccattgcggaactcaaagtattaaacaacttaaaaacggatacgatctacgtaaaccaagtcctgaaaacaaaaggaacgtcttcttcgggaaacacgccgtcaaaagacaattcaaaccaaaatcaaaaccagacgcaaacgtcctcctatacagtaaaaagcggagactcactctggaaaatcgcaaacgcatacaatatgacggttcagcaaatcagaagcatcaacaaactgacgtcagacatgctgcgggtcggacaagtgctgaagctgaccaaaacgtcttcttccggctcttcgtcttcaccgtcagctccgaaccagtccggaaatacagggaaaaccactacatataccgtgaaaagcggggattctttatgggtgatcgcccaaaagttcaatgtgacagcccagcagatccgcgagaaaaacaatctgaaaacagatgttcttcaaatcggacagaaactgacgattaccgggcagcagacaaacacgacaccgaatcagtccggcagcacaggcggcacaggttcaacaagcgcgaagattaatgtaatgatcgatgccgcaaaagctcagctgggcgtaccgtatgtatggggcggaacgacgccgagaggctttgactgcagcggtttcatttattacgttctcaataaggtcacttctgtatccagactttcagccgcaggctactggaatacaatgacatcagtcagccagccggcggtcggtgactttgtctttttctcaacttataaagccggaccttcccacgtcggtatttatctcgggaacggccagtttattaatgccaacgattcgggagtcgttatttccagcatgaacaattcctattggaaacagcgctacctcggcgcaaaacgtttcttctgatacctgataagctgtacggccgcataaggctgtgcagcttttttacagtctgaaaatattgatgctgatcacgtgttttgttacgggatggaaatacacttcagcacgggatgaaaacgtttcttttgcggtttgcaccgttacgcgaaacacgtctttcgtctgttcccggttcacttttgtacggcccatgtacgaataatcggtaagctcggcccccttgtattcacgttcaagctggttccatgcgagctgttcccatttttcaactgacggatcgaggtgttctgtatgccctttttcagcgatagaggcaatgagaatgccgcaaaacaagagggcaagcgcaaatggaagggatttcatctttatgttctcctgagtcgttttttgtcaatcttagcgtgtccaaagaagagacggatatgcggttttattttatgtctccctcatattgctatgccgcagtgataaggacaccaagttttcccccgttgcatccgggcttcggcggcataaactaacggagaacttctcattgaaaggagaagcgtaagatggatcatgccgattatgataaagccttgtattacacacaccggtctcaatgggacaatttattaattttgatggttcgtacaaaagatgatttattatcaaagcgtattgagcactttctacacgcgtatcatttcgaatatgatcatgccgtgcttgaaaaagagctgtattcccttctcgggtatattgatcatgcgacagagctcgcttatgaagatcaattagccatgctgacataaaacaatcccggcgtcagacgccgggatttcttgtgtttgtgaacatattcagctcttcgatcatgtctttcaggctgaccgccatatcctcagatacggtccggcgctccatgtcgatgtgaatcgggtctaagaccagctgtttcgggatgacatttgcatagacgccccgcatgaccgtccgcatattcgccagcgcattcatgcctccttttcctccgcccgccgcggcaatgacggccaccggtttgtatgcccagtgatcgctgcttaaaaaatcgatggcgttttttaaagcgccgctcatgccgctgtgatactcgggagataataagacgacggccgctgactttttcacctgccgccttaacttttgcactgaaggcagctcgttctgttcttcttcaccgttataaagcggcagttcactttcgctcaaatcaataaaatcggtatgaaaccgatctctgatataagaagcggcaattctcgtccgcccgttttttctcggtgtgccgctgatcactaatatgctcatgattttaccgcctttcccaaaacattatattttaccgcatacaatgccgcctgcgtccgatcggaaagattcagctttgacagcaggttggacacgtgggtcttcactgttttttctgaaataaacagggccgccgcaatttccttattgctttttcctttggctatttcttgaagaacatctttttcacgggggatcagctgataatatttttccttatcctgatcatcctgaaccatatgggtcagcacgtgaggcacaatatccgaacttccggccgccgtcctcaagcggtacggtcgcatgatgggtaatgccctccgtatcgcggcagttcgtcgtctgttccgcaaattcaatccgtttgcaattcattatgtttacggcctttgtcaatccgccattgctgaatttggtcagacaatagcattccccgctgcacatgagtgcattttcccgctgaccgagagcaggcggtaaataagcggatgcggcgagcgtataagacccgtccggctcaatcagaaaaatccaccctgtctgcagtccggtcaggctgagcagttcgcggagcactttatcaagcgcttcctttaaatcgtggttttggtttaaggtttccgcaatcgcttttaacgtttttaacgtttctaccgtcgttttcgtcaatttccctcactccggccaatcagaattatccatattatatcaattcttttctgtatattcctttgttttcagcatgaattttcctcatactttcggatgaggcgtataaaaaaaccgccggatgtcgcttccggcggtttgttgtttatttcgttttttccactatgccatccaccgttttcatgacggcttcagataatgcggcaagacgctgttcgctgtcttgtaaagaagtccccttcacggcgaaatagaacttcactttcggctccgttcctgatgggcgaaggcagaaccaagagccgtcttcaaggaaatatttcaggacatttgacttcggcagatcaatatcttcttcaagatgatcggcaaatacagtccgttttcccgttgaatagtcttcagcctgcgtgatttgttttccggccatctgcttcggcggatcgtttcggaatgaagtcaggatagcggaaatctgctctgctccctgtttcccttttaacgtcaatgacttcaagccttcacggtaatatccgtattctttaaaaatggacagcagcgcgtcataaagcgacatgccctgctttttataaaaggcgcatacctcgacggctaacagcgcagcctggatcgcgtctttgtcacgcgcgaaatcgccgattaagtagccgtagctttcttcatacccgaactggaacgtgtattggcctgatttttcatattctttgatcttttcaccgataaatttgaagcctgtcagcgtgtcaaccgtatctaatccgaacgatgaagcgacagcgcggcccaattcgctcgtgacaatcgttttcatgacgacaccgttttcaggaagggtgccctgttttttcttctcggaaagcaggtaatgcaataaaagcgcgcctgtctggtttcccgtcagcactgtgtacttgccttcgctgttttttacggcaatgccgagacggtcggcatccgggtccgtagcgacgagaatatcggcattttgttcttctccgagcttaatggcatattcgaatgccgcgtgctcttccggattcggcgatttgacggttgaaaaatccgggtccggcagctcttgctcctttacgacggtgacgtttttgtaaccgagtgcttcaagaccgcggcgcaccggtttatttgccgtgccgtgcagcggagtgaacacgacgctgacatccacttcatccgaaagctcgggatgtacggagatggaagtcagtttttcagtatacggtttatcaatttcttcaccgattattttaatcaaacctttttctttcagcgactgttcatcttcaacttgaatcgttaattcattttctatggcattcacttccgcaatgacgatgtccgcttctttcggcggcagctgtgcgccgtcatcgccatacactttatatccgttatattcaggcgggttatggctggccgtcacgacgatgccggcataagcgttcagctttctcaccgcaaaagacagctcaggcgtcgggcggagctcatcaaagacgtatgtttgaatgccttgggaagcaagggtttttgcagcttccatcgcaaactcaggagatttatgacgggagtcgtatgcgatcgcaacccctctttttttcgcgtcttccccctgtttcgcgatatacgccgcaagtccggcggatgctttgcggaccgtgtaaatgttcattctgttcgtacccggcccgatttctcctctcatgcctcctgttccgaactcaagatttttgtagaaaaaatcttccagcagctgctcgtttccttctgcgtccgccaataattttttcaattctgaatctaattgttcggcctgattccagcgttcgtaactcttactccaactcatgttcgtcctcctataatttcagcttatgaccatattttaatatgaagcggctgcccgtgtcacttgataacttaaccaaatgctttatgtaaaaagataaaagaagggctcatgccttttcggcacagccctccggttattattgttcgagcggaacaaccgcgtcgtgcagcagcgtatttaaccactcagtgtgtttttctttcgtttcgtcattccattggaatcggtcgctcatgtaatcaatcacggccgttttatacgtttgcacccatttgatgtcgaagaacagtcttcccgttctgcggacgaagaaatcggcaggtgtcgcagccatttcttcttcgatgctgtaagccgcttccgccagaatgtgaaccggaatctcgcgtttttccgcttcatctttcaggccttcaatccggctgaatacattttcaacgttagagccgtatctgatggctaactgcttagcggtttcctgtgataaaccgattttcaagccgtcttttgtctttgcttccacaaatgactcgaagtttttagagccgccgacatgtccgccggaaatcggcatcgtcttcgtcttgcagccgccgaagtcctggccgccctcttctttcaagcggtcgcggacaagatcgacaatgtgctcagccattttacggtagcccgtcagttttcctccggcgatcgtaatcaggcctgattgagatgtccagatttcatctttacgggagatctcagacgggtctttcccttcttcgtgaataagcggtctgaggccggcccagcttgattcaatatcgtccgccgtaatgttcagttccgggaacatataattgatggagctgacgacataatcgcgatcctgcaccgtcatgcgcgggtgctcaagtttttgtttgtaaaccgtatcggtcgtacccacgtatgtttttccttcacgcggaatggcgaacaccatccggccgtccggcgtatcaaagtacaccgcctgtttaagcgggaatacggattggtcgaatacgagatggaccccttttgtgtgctggagatgttttccgcttttgctgtggtctttttctctcagttcgtcgacccacggacctgtcgcattgacgatttttttggcgtacactttgtattccttgcctgacagcagatcttcaattaaaacgccgacaacttttcctttttcataaagcagttctttcactttagaatagttgacaggctcagcaccgaatttaacggcttctttcatgacttcaatcgtcagtctcgcatcgtccgtccggtactctacataatagcctccgccttttaagccgtcttttttgacgagcggctctttttgcagcgtttctttagcagacagcatgcttctgcgctctgatttttttactcccgctaaatagtcatacacacgcaggccgattgaagtagagaatgaaccgaacgtgccgcctttatgaaacggcagcagcatccattccggcgtcgtgacgtgcgggccgttttcgtacacgatggcgcgttccttaccgacttcagccaccattttgacttcaaattgcttcagataacgcaaaccgccgtggacaagctttgtggatcggcttgatgtgccggccgcgaaatcctgcatttcgctcaaagcgactttcattccccttgaagcagcgtcaagcgccgtaccggcacccgtaatacctccgcctataataaacagatcgtatgtttttttagtcatgtcttccagcatatgatcccgttccaaacttgaaaattggtgattcatcattacgcttcctccttgttgtcacggtatagaaaaagagaccacaacagccaaagcgcatgtcatcactttggtgctgtggtctctcctcatctcaggaccgttcctattaacttgttttcagtataccataattttatcttatttaaaagccatagctgcatttactgcttttttccatccgccgtacaattcaacgcgtttttcatcttccatttccggtttgaattgcttatcaaggttccactgatcggcgatttcagtgctgtccttccagtagccgacagcgattccggctaaatacgcggcaccgagcgcagtcgtttcattaatttccggacgttcgaccggcacatcaagcaagtcgctctggaactgcatgaggaagttattttttaccgctccgccgtctacacgcaatgtttttaaagagatgcctgaatcagcctccatggcatcaagcacatctttcgcctgatatgcgagagattcaagcgtggcacggataaaatgctccttcgtcgttccgcgtgtcaggccgaaaactgagccgcgcacgtcactgtcccagtacggtgtgcccaatccgacgaaagcgggcacgacataaacaccgtcagcggaatccacacgctctgcgtatgtctcgctttctttcgaatcctggaacatccgcatgccgtctctcagccattggatggcagaacctgcgacaaagatgcttccttccagcgcatactcgacttttccgtctaatccccaggcgattgtcgtcagaaggccgtgatcagaagtgatggctttttctccggtattcatcagcataaagcagcctgtgccgtatgtgtttttccccatgccttcttcaaagcacgcctgaccgaacagcgcagactgctggtctccggccgctcccgcaatcggaatatttttaccgaagaaatgataatcaaccgttttcgcgtacacatgagaagacggtttcacttccggcagcatggatttcggcacgcctaaaatatcaagcagctcgtcatcccattttaattcatgaatattaaacatcagcgttcttgaagcgttggaataatccgttacgtgcgccgcgcctccggacattttccagatgagccatgaatcaatcgttccgaacagaagatttccgttttccgctttttcccgcgcgccttctacattgtcaagaatccatttgactttcgttcctgagaaataagggtcgatcaaaagtcccgttttttctctgaatgtatcattatatcctttttcacgaagctcttcgcaaatgccggatgtttgtctcgattgccacacaatcgcattgtataccggctttccggtatctttatcccatacgaccgtcgtttccctttggttcgtgatgccgatgccggcaatttgatcagcgctgattccggactcggaaatcacagtcgcgataacggcgagcaccgatccccagatttcgttcgcattgtgctccacccagcccggctgagggaaatgctgtgtgaattccttttgagcggaatgcacgatttttccttctttattaaaaagaatcgctcttgaacttgttgtgccttggtcaattgataaaatataggtctccatgatgccgctctcctttttaaatatattcagaatttgataatgttttctgtgattgagatttcttggtataaatatagagtatgaaaagcactacaaccattataacgcttacaaaccaaaagctaggtgtcacatttcctttaaacgcggcattgtaaaatacgccgccgaacgcaccgcccatgatcggaccgattacgggaatccaggcatatttccaatttgacggcccttttttcgggatcggcagaaaggcgtgagcgattctcggccccaaatcccgcgcagggttgatcgcatatccggtcgtccctccaagagaaatcccgatggcaacgatgaggaatccgacaatcagcgggttcagcccttttgtaaattcattcgctccgattgccaaaatgccgagcacaagcacaaacgtaccaatgacttcacttatcatattcccaaatgtatggggaatactcgggccggtcgagaaaacgcccagtttagcggccggatcatccgtcgccttccaatgcggcagataatgaaggtacacaacaaccgcaccgatcattgctccgatcatctgtcccgcaatataaacagggacgtctttccaaggaaagctgccttcaagcgcaaggcctatcgttaaagccggattcaagtgagcgccgctgatgctgccgacggcatatgccgccatggctactcccaatccccagccgaatacaataacaatccatccggattggtatgaaagcgatttctttaagttgactcccgcacaaacgccgccgccgaaaataacaagcagcattgtaccgattacttctccccaaaatgctgtcatcatcattcctcctaaatgacaaaatagcaggtttgacagagttatagagaataaaaaacccacaacaaaccgctttacgctttattgcttccgtaaagagctgttgtgggtctccgggtctccatcacatagtattaacctaggtctattgtaacaatgggtgtaagcggtgtcaatctttttttgtcatagaatgttcatatttagcccatagttcggtgtctgaagtcgtcacggccgtggctcctgcctgcaaggcgttttcaacgtcctgctccgtgcggatgaagccgccggcaaaaatcggaatccccgtcatttctttaatttctctgattaaagtcggaacgatgcccgggagaacctcgataaagtcaggcttatgctttccgacgaattccatgcttttttccatggcgctcgtatccaagagaaacagacgctggatcgcgtatattttcttttgtttcgctttgacgatgacggcggatctcgtcgaaatgatgcccgcgggccggatgtcctgacaaatgaactccgcaccgtattcgtcatgcttaatgccgtgaattaaatcgacgtgaaccatcagaagttttccgtgttttttcgcttcattcacgacaccttttaattgaccgaggtgtatatctaaaatgacgccgtataagaacggactctctaaaaatgcatcgaattgcttcatgttccggatagccggtagaatcttctggttgtgaaaactcatgttttactcctttactttaaaaatcaatgctcagcacgctttccttgacggtcgaaatgatgaaagagagctcctcgtcggacaggcaaaaaggcggtgacagctgaatgacattattatatcccgctacagtatcaccatttttcccgacaagcaggcctttttctctgcacgcggtgatgacgtgctgcacaagagcggcatcagcgggttccttcgtgattttgtccttgacgagctcaatgccggcaagaaggcctttgccccgtacatcgccgaccgccggatgttctttgagcggctcaagctcacggagcagccgttctccaagctcccgggagcgggcgatcagattttcgtcctccatcaattgcaggtttttcaaagcaagggcgcaggctgccggattgcctccgaatgtattcacgtgccggaagcggccgtacggctcaccgcccgaatacgcctcaaaaatctcccgttttactgccgttgccgacagcggcagataagcgctcgtaatgccttttgccattgtgacgatgtccggtgaaacgccgtaatgctgaaatccgaacggctctcccgtgcggccgaaaccgcaaatgacttcatcactgatcagaagcgcgccgtggcggcggcaaatgtcctctacctttgccatatacccgtccgggggcatcagtatccctccgcctgtaataatcggttccataataacgccggcaatcgtttcgcttaactcccacgtcatgatccggtcgatttcatgcgcgctttccaatgtgacggcatcgccgggattccgataaagatcaggcggcgccgcgtgcaaaaaaccttgtgagagcggctcatatttatattttctctgcgcctggccggtagcggcgagcgcccccatcgtattgccgtgatagcctctgtaccgggagatgaatttgaagcggctgtgatcgccgttttcaatgtggtattggcgggcaattttgaacgcggtttcatttgcttccgatccgctgttggaaaagaagattacataatcgccgccgagccattcattcagtttttccgcaagctcaatcgcgggttgatggctttgggtcagcggataataaggaagctccttcaattggctgtaagccgcatcggcaagctcctttctcccgtatccgatattgacgcaccacaatcctgacatgccgtccaaataccgtctgccgtcaatgtccgtaacccaggcgccttcccctttttggacgattatgctgtcatccggctccgcccctttcatcgcgtgccaaatcagctctttatccttttgtttgagtgactgatttttttgtacatgttccacaccgctcatctccctttcaatatcattgcactgtatcgaaagctgcccggcttctgacgccgattctcatggtgaagttttcctcttaataagaatataaaggcgcggcatgggcgagtcaataaagcggcggcaattaaaaaaacgctttctcccagaaagcgaaagggctacaagagcatatcccgaaaccggggccggtgcaagtgtttttataaaaaaacccgcccttaagcggggcgggcgtttttttatttcagatgcgtaatccggtaaatgtctttgcgccggtctttcagctggcgcacggttccgttttcacgctgccttcttaagatttcaaggtccacgtccccgatcacgaccatttcgatattcggattcgtttcaccgacgattccgtctctggcgaattcaaaatcagacggagcaaaaatggctgactgcgcgtattgaatatccatattttctgtttgcggcaggtttccgaccgtacctgagatgacggtgtaaatttggttttcaaccgctctcgcctgagagcagtaccttacgcgcaaatagccttggcggtcttcagtgcagaatggcgtaaagataattttcgccccttgatccgcggcaattctcgcaagctccggaaattcgatatcgtaacagatctgaatggcgatctttccgcagtccgtatcaaatacgcgcaccctgtctccggcgctgatgccccaccatttccgctcattcggcgtaatgtgaagcttatattgtttttcaatcgtgccgtcacgtctgaataagtaggcgatgttataaattttcccctcttcttcaacgaagtgggagccgccgataatgttcacattatatttcaccgcgagatctgtaaagaggctgatatagtcctcggtatattcggtaatcctctgaatggccagactcggagaacgctcttcgagaaatgacataagctgcgtcgtgaaaatctccgggaataccgcgaaatcagatctcgcatctgaagccacatcgacataatattcaacctgattggcaaattcctcgaaagaataaatctttttcatttcatattgaatgacgcagatgcgcaccggaaatgccgatttgtaatagcgctttgactgcggcagataatcgacattgttccattccattaatgtcgcatatttaatggacgcggtgtcatccgggagataattcggattgatccgcatgagcgtaaatccgttcatcagctggaaagaaagcaccgggtcataaatctgatggcgcgtcacctgttcgacataggctctcgccgtcatttcttccgcatacttatgataattcggaatccgcccgccgataatgatgcttttcagattcaatcgtctcgccaagtcttttctcgcctcatacagccggtgtccgattttcatccgcctgtattccgggtgaaccattacctcaatcccgtacagattcaatccgtccgggttgtggttcgtgatataaccgtcgtctgtaatgtcctgccacgtgtggcggtcatcatattcatcgaaattgatgatcaggcttgagcatgaaccgataatttccccttcatactcggcgcaaaactgaccttccggaaagtgcgcgagatggctgattaaatgctcaggctcccacggctccatccccggaaaacaatccttttgcagctcaataattttgttgatatctttctcttccatattccgtatgaccattttcttttcaaaacgggtcagatcaagtttctcagacaatgctgcttccccctgccggttcgttttgatcgttcaatcgctgtaagagtaattcaagttccatttccgccatcgattccagtctgtgatcgtattcttcaaataacagggcgctcgttaccttattcggcacgatgacacatttcatgccggcgcgtttggctgcgattgagccgttgaccgaatcctcaaaggcaagacattcagaaggttcaacgcctaaatgttccgcagctttcagatagagcttcggattgggcttcacttcttctacgtcgtcagccgtctgaatcacttcaaattcatcaaacaggcctaattccttcagatggcccgacacccatttaaaatctgagctggaagcgagccccaccttcaatcctaattcttttgccgcggctaaataagcctccactccgggacgcgccgtttccgtcttcatccgctgttcgaagcgcccgcgcctgatcgccgtcagttcatcatgatcgagctttcttcccagctgctcctctaaatatgcgaacggcttaaaccccgccgccgttccgatcacctttccccagacggataaaggcaatgttgaaccgtgttcctcaaacatttcctgcagcacttcatattcatgggtttctgtatctaaaattaacccgtcaaaatcaaagattaatgcttttatcaatggttacagctcctttagctaaacgtactgacctatgtatacactataccgtgaatttcttttgcattcaaaatgtaacattctcacggaaagaagagcctgcatgagtgcaagctctcttcatccgttactgtgtgttttgactggaaatattggaaagagccgctcccgcagactcatttgaacgctgatcgaccgctaagtctccaagcgcaacgatcccgaccagatgattttgatcgacaatgggaaggcggcggatttggtgttgggccatcagatgtgacgcctcttcaagactcatttccgggtttccggatacaacttgagaagacatcacgtgtgaaacaggtgtttggccgtcgcggccttgagccgttgttctcaatgcgatatcacggtctgtcagcattccttttaattcccctccgtcaacgacgggaattgctccgacattatgctggtgcatcagcgcagccgcttcctggatcgtttggttgggagaaacggtagccacgtgggtagtcattgattgtttgattgaactcattgtaaagcacccctttcgcattttattatgctcggggatttgactcattataaagggagttagaggaaagaaattgtggtatcatgtcaaggaagcaaaaaagagcctgtcaaaaggctctttatacccgtcagatcagccttctgtgaccgcaggcttctgatccggcccctgtctcgaaatcatcataggtaaagggaaaattcattccgcattcattcagcaaagcgcaatttttatcaaacagcgcccgctctttgacgtcatatacggggtgcggctttgacagcatgatatgtaccgtttgcagacaagccataatttgaaacgcttcttttaaagttccttggtaacgttggttttgtaaagacaatacgcccctttttttaaagcgctgaatttccagttcggagaaataaagaggaaagacattttgaaacaattcagaggaaagctcttgtatcgcgctttcttgtccgtcagtcgctgcgttcacaattctcacatcaatcacctttcttgccatgtgaatatccttaatctttatcaagaatagcatagaaaaaaacgcgaaagctaaggtaagtgtttcctattgaaacagccgctttccgcttgaaaaggagctttatgatatgaaacaaaatgaccgcggtctggaactcctgattacggaaaaacacgccggacaatggctgttttcagtcctgaaatctgaattccaggcgtcaaaacccgtgataacggaatggatgaaccaaaaaagcattcaggtgaatcggacatccccgaaaaacaacatcatactgaaaaccggagaccgcttattcattgatcttcaggaaaaaacgggttcttcggtaattcctgaatacggagagccggacattttatttgaggacagtcatatgctgattgcaaataagccggcgggaatgccgactcatccaaatgaagagggtcagaccggaaccctcagcaacctgatcgcttaccattttcaaatcaacggcgaacaagcgaaagtgcgccacgttcaccgtcttgaccgtgacacgtcaggcgcggtcgttttcgcgaaacaccgcctggcccatgcaatccttgaccgtcagctcgaaaccaaaacattaaaacgcacctatatcgccgcggcggaaggaaaagtcacgccgaaaaaaggcacggttgactcgccgatcggccgcgacaggtcacattccgtcagacggcgcgtctcacccggcggacaagccgccgtcacccattacaaagtgaagggctatcatcccggtgcgcagcttacattggcagagcttgaactggaaaccgggagaacacatcaaatcagggtgcatatggcaagcatcggccatccgttggcgggcgatgacctgtacggcggaagcagggcgctgtttcacaggcaggcgcttcacgccaaaaaagtcagtgtcgtccatccgatctcaggagaagaaatcgttgccgaggcgccgatgccggctgatctggctcattttaccgaaacgtatttttcttaaaccgggtcggcatatataatatatcgtttcggcgcatttccaatgtaagaaaacggatagcaagtggtcaggatcagttcctcccgcttgtgttgaagggtgatgacagacgtatcatcccggctgacgatttttgtacggctgattttataagaaaacgtgccgtaagacaaaatcacgttcagtctgtctccttttttcagttcgccggtccggcggaacaccgtgtccctgtggccggataacacaatttggccgtgatcgccaggataatagctgtccttataatgtccgacgccttttgctaaatcatctgcgtcagtcccttcgacgatcgggagctcagcgtcaatttcagggatttctaaaatgccgcttgcctcacccgtttcggggtgaaattcttttttgcgctgtgcctgcacagcgctttttgtttcgttcttttccaagacaggttctgttgctttttttgcttcttcaagcgattggttcgttttcatatgtgaatcaatgatcttccagcttccgtaacatgtgatgataacacctgcgatgatgacgagaagcggaatatgtttcagtttgttcatcgtgtgcgggttccccttttctttctgaaaagccaatatacgccggcacccgtgatcaccaggccggccaatgccgtctgatggctgcccgctgaagtatcaggcaatgggcggcctttttgtgtgccgctttcagtctgttctgtgctttgttccgaatctgcggcagacgccgtacgggattcgggaattgactgcactgtatcagatgctgcttcttttacgacaggacgttcaggttttttggtttgatcaggctgttctgctgcatccggttttttagcgggtttttccgtttgaggtttttctcctttatcaggcccggtgctgcccggtgtttccccgcttcccggctgattgccggtgtcatcaggtgtttcggcggctgatgccgtgcggatgcggccgtcggtttgataagaaatcggtgcggaaaagcttttgacatagtctactgtcgcttccaaatcctcaggccccgtcaccggattcttgccgagtttcccgatcggaccgtattttgcccccgctgccgtcgccataaattgattgactgttactgtatatcctttttcgggctgtatgtctgtaccgtccgccattttcacatccgccgcttgtccggtttccgggttccatgtataggaaaatccgctgatgctgtaatccggtccgtacaccggagaaatttgcgcgttgatgatctcccgcaaatcttttcctttgatttcaagcttcgtcagcacattgccgaacggctgtacattataaagatctccccatgtgatcggccctttttttatgccgtcccggatgcctcccccattcataagcgcaaaatcggatttcatcttcgctttcataccgtcggcaatcagatttccgagcgccgtgtcgccgtcatttgaatacccgcccgttatatcatgggccgcttccccgaccgcttcgctgataatcggtttcactttctcttcatatttgcttaatatgcctgccgcatccggatcaggcttgattttactttgatcgatatattggatttccgctgattttttcacgatatccttcgactctttatctagttcgagatcggcgattccgattgcttttccgtattcaaatgcctgcacgatcagcttgccgttgatttctccgtttacgactttatgattgtgcgcggcgaaaatcacgtcaatctctgagtctgttccgcttgcaagctttgcggattctcccgtgatggctgagccattttgttcagcagacatatgggcgagcacggcgattgctttaattccttttttcttcaggtctgcggcggcgtcattgacggcctttacctcatccgtaaacgtaatatttttaattccgtccgggatgaccatgcctgccgccgatctggttacaaccccgataaatgcgaccggaattccggaaacgtatttgatttcatacggcggcagaaaggactcccctgacttcaatttacagttggcgcagacgagcgggaaatcttggccgtcataaccgcttgtccccttaccgtccggatgatctcctccattgatgatccgtttaagctcattcgttccttcatcgaattcgtgattgccgacagttccgacatcaaaaccgatgtcttccatcaattctactgtcggttcatcctgaaaaagggctgacacgggagagctgcccccgatcatatcgcccgcatgcacgacaaaggcgtgttctttctcggctttcgcctttttaatgtacgcggtggcgtagtccatccgtccgaaagtgccatccggtttaccgtctccgttaaggtcaagctcatattgctgatcaatttttccgtgcagatcattcatgctgatgattctgagcgggatacggccggagtcttcagtctgccgttctttatacgctttatccgttccagcttcattcagtgatccggcttgtccgattgcttccgcatctttcacgctgaacatcataaaacaaaccgtcagcaaacagcacgaaagacgcaaacccctttttttcttcattcatttcccccctgtcttctaagaaatacgttagcttattttcttaaaaatcacatcacttttttgtaaagattgtcttcgctggcgcaaaatagtaaataatccccacgtaacgaaataagtcttgatgtataacggatcggcttttttcacatcttaaatgtgatttgacatgaaggaggaaaacaaccagtggaacagcagcagaatcagcagcagccgccagtaaatcaggggattccgggttcaccgcaagtgaatcacggaggacatgagcttttcgatatgcatgaagtgctggccggaacagtcggcgttttggatcaatttatgatgctcagacagtttatacaggatcagcagctggccgacattcttgaccgccagtatcaattcattctcggactctataatctgacggcagaatgctttaagaccggccaaaagccttctcaggaaacgtcgacatatatgatggaggaacagaaccaggccgtctacggtataaaaccgactcagccgaaaaaaccgaatcaatcattaaatgatgtcaaagatctcggaataagcggccatatgctcggcctgattaaagctcaagcttctctcttgacgatgagctcgcttgaaatgaccaatcccgtcacaagaagagtgctctccgcccaaattcagcaatatgtcgaaatggcgtatgaaatcttcttataccaaaacaaacacggttattatcaggttcctcagctcaatgcacaagatatgcagaccatgctgaattcatttgcgccggcgcagggacagccgcaaatgcctccgattaaaggacaaatgggacagcagcagcaaaacctccattaatgaaaaaaacggcgttggaaagctgactctccaatgccgttttctttttttcatatgcttttgtgaaatcatgttcaaattgtttcaggctttctttcgtagctgcttcaaagcctttttcaaaatcctgtgtttcggcggttttattgataatggttaagataatgccttctccgaatgtttcggttaaatcctttatcatatagaaactttgcaaataaacatccgtttcatattccatacgcgatttctgccattttcggtcggtcgttaattgatcaaacggcacgacggaaaatgcaatcggatcaatgaccacatcataatgcgcaacccactcgctcagcccctcatgaaaccaaagcggaaatacagacgtatccgtccccaattgccgcgctttttgatgaaatgcgtagtgtgtatattcatgtataatcaattgcttatacatgaaaacggccagctcatcttttttcaaaagctgttttttctcttctggcaagagccccatcatctgctcctgctctgaataaaaaccgactacatttttcaatcctgagtattgctccatttcagcttcatccgaaaagaaaatgagttcaagaggcgccgctcctttatagccgacaatgatttggttgatacgctttgcgtggtccagcgtaagcttggtcagatccaagagcggcttttcatccgctgtatagtaaatcgctgtatgtttgtaaatttctttattcatgtgttcagtcacttgttccttcgtcggaacagagcggctgttttggcctgacaggacgtacatcatacttactgaaacggctgaactgacagccaatatgacaaggactccgcacaggatcagagtgaatgccgcccgtttccccatgccgtcacgcaaacaagctcccctccccgatcctttaattttcatctcattctttactttatgctcagaagcgctgggtcgtgacggcagataaaataaaaaagccgcagcaaatgcggcttttccattcatttatttattggggtttgggaatacacgctgcaccatttggccgaattcatcaaacagtccggataccgggtggccgttttggattcgttttccgtagccttgcatacgttcaacgaagtccgggtttgctgatacatatacagtccggacatgtttatcggctgatttcaccttatcggtaatcttatttttcaaatggttggcgatggcgcctttttgtccgtttgtcagaacaacggctacataagcgctgtttccggcaacgatcacagtcgcatttttaacttcttttaaatcagtcaccttgtctgcggctttatcagccactctcaggttacggttgtcattgtgatcggtgttttggttatgacggttcactgtattcatatttgtcgcaccgtcgttaggtgtgttgcggtaatttacattctgggtgcggttgtcatttcgttttccttctccctggttccccatactgcaccctgcggtaatcagcatcggcagaagaagggcagaaataactgcttgtttttttatcatgtgaattcctcctttctcactttacgtataggtttttctattcggcgggatttatgcacgccgtttgcattctgagcggtttggataaatatcagaaggatagggaaaggtaagcgtaatcaattgaatgaggagggatttaacttgttcagacaaaaaagcggcatcagcccgacagcgctgctgatcggatcatcgattctgattgcagctttatcacccgaaatccgccggaaaatctccggaatggtttcaggccgaatgcagcataaagatggtacacactccatgcagcctgctgacctgattcaacaggctttcagcggggaatccggcggacagcagcacacggacaaagcacggcattcacaaacaggctccatgcagcctgccgagctgatcaaacaggctttcggcggggaatccggcggacagcagcacacggacaaagcacggcattcacaaacaggctccgtgcagcctgccgagctgatcaaacaggctttcggcggggaatccggcggacagcagcatgagcagacttcccgcaatcactccggctcatcccatacggacggacaggcagaccgcagtaaagaaacttcgccgaagcctcactataccgagccgattcacttcgaagaaagcgcggtaaatgttttaaatgacagcaccgtgatgaatatgctggaagaaattgaacccggaaatcattagaaacgaaaaaaatccttcattcgttcaacgatgaaggatttttcgttttagcgctatctgcttttttattaagcttcttcagcttcaatgacgattgaggaatcattgtacaccgcggtatcggtttccttcgtcattttacttgttaacagccctgcggtcatactgccgctgacatttaaggcggtacgccccatgtcaattaacggctcaattgaaatgagcagcccggcaagcgcgacaggcatgttcaaagcggataggacgagcagagccgcaaatgtcgcgccgccccccacgcctgctacaccgaatgaactgattgccacgatggcgatgacggagatgataaatcccggttcaaacgggttttgccctactgtcggcgcaatcatcatcgcgagcatcgccgggtaaatgccggcacagccgttttggccgatcgataaaccgaatgaaccggcgaagttcgcaattccttcagggacgcccatgcttttttgcgttttaatattaagcggcaaagcccctgcgcttgaacgggacgtaaacgcaaacaccatgacaggaaatgcttttttcacgtatgtgatcggatttaaaccgctgaacgtaatcagcagcaggtgaacgataaacatgacgataagcgcggcgtatgaagcgatcacaaacatccccagtttcgcaatgctgtcgatgtcgcttgtcgcgatcgtctttgtcataatcgccaataccccgtaaggcgtcaatcttaaaattaacgtcacgacgcgcataataatcgcgtataccgcatcgacaattccgctgaacgtcgcagcgtgctccggctgcttccgtttcacgcccagaaaagcgatgccgaggaaagcggcgaaaataacgactccgatggtggaagtcggtctggctcccgtgaaatcaagaaacggatttcccggcagaagctcaacgatttgctgaggcagcgttttggccgtcatatcctcagatttttgctgcagctcctggcctcttgataactcggtgcttccctggtcgatatggacggctttcagatcaaaagaaagcgccgaaacaattccgactgccgcggcaattgctgtcgtggcgatcaaaattccgatgatcagtccgctgattttcccgatgttatgggtcagtttcagcttcgtaaatgcgccgagaatagaaataaagactagcggcatgacgatcatctgaagcaatttgacataaccgccgccggcgatattaaaccaatcggccgtttgtgtcacgatatgtgatgccggcccgtaaatcaattgcagtgcaaaaccgaatacaatgcctagtccgagcgcggtaaagacacgtttagaaaaggaaacgtgttttttttgcatgacaaacagacctgctataagcaaaagcataataaaaacatgtaagactacaaataaattctccaaaacaggtaaacactcccttgctcattatcctttaacactatattatatcaattccgatcggtcaagtaaggattgacaatatatgtatttttattgatttttctcttttctttccaccctttctctagtaacttatataagggtgattgttatgctgaaggaactgtttcttaatttaacgattttaatcacatttaattatctgttcacccttctttttaaagagtcgctttcgtataaagaagaccgtccgatgtttcaattactgaaggggacggtctgcgggcttttaggggtttttctgattgctttcggcttttcttactccgattccatcattgatctcagaaatatccccattatcatcgccgctctttacggaggctgggtgtctacggcagccgcctttgcgattatcgtcgcaggccgtatcctgatcaatttcaatgcaagcgccattttttccatcgccgccgtcggggttattgcgatactttctgcggccgtcctcagaggaaaaaagccggatcataaaatggcgttcgttatgctgcttttttcaaatgttattttcaccttgacgctgctgtttcttatgcctgaacagcctgccggggccctcgtttattattggctcatttccatcttgggcggaatgctgtcactgtatatcatcaaacacgaagccgatgcccgcgttttgttcaagcaatacaagtttcaagcgaattatgattttctgacggggatttttaataagagaaaattcgaggaagtctcgcgcgttctgtacgatcggacgtctcaatccccctcgtctcagctcgcgcttatttatttggatattgatcactttaagcagatcaatgatcaatacggccattatgaaggggaccaagtgctgaaggaactgggggcgcgcctgaggttcttactcagcagttctcatacgtcagcccgcatcggcggggaagaatttgccgtgcttatgcccaattgcacgtatacaaaagggcttcacctcgcagaggaaatcaggcacacgattgacgcgaacccgattctgctgacgagcggagatacaattcccgtgaccgtttccctcggcatcgcgcattatccgacaaatacaccggaccctcagacattgcccctgatcgcggaccggatgctgtacaaagcgaaaacatcagggcgcaatcaagtgtgcagcactgaaaaaaaagaatgatcgcccgaagaggaaatcattctttcttttcagtgagaaagccgcccctcaggaaaacgggaatcaggctgccctcatattctttttcaatcaacgccgcggtatcatctgattgatacaaagacaggagtttttgcatccgttcatcatctttatcctcagctctgacggcgatcagatgaatatacgcttccttcatttgcgccgatcggatcagcgcgtccttctccgcatgaaatcctgcttttttcgcctcgctttgactgagaactgctgcgtcagcatgttccgccgcctgataggcgttcttttttgtttccgtttttaaggtcagatgcttcgggttgtccttgatcatatccgttgaccccgtaccgctgaatccctttttcaatgtaatcagtccggcctcctgcatgagaaaaagcgccctgccgaaggccgccgcttcatcaggcacggcaatgaccgctccgtccggtatatccttcagccgtttatgttgcttggaatacacccccagcgatgccgcatatgtcgttcctaaaggggccagcttctttttcacgtgaggcggcaaagatttaaaattagtaacggattgaaacgcattggcgtcgagatccccgccggcaagtgccaaatcggcctcagcataatccgaaaacgttaccaaagaaagctgcaatccttcctcaccggcttttttcgcgacaaactcccagatcgattgatcagattcattgattccgatagtaatggtccggttcccgtcaggataatcgcatgaagtaagtgacatgatcaaaatgaaaagaaacagactgtttataagccgcagattcaagttgacctactccctatctatttttatgtacagaagctgcaccatggtattcgggctcatgattacatacaataccgattaaaaaaagggttgtcaattgcttccttaagaggctgcaaagcggtttttatcagctgcaaatgggctgttctggtctcaaatcagatttccgtatcagagcgttttcctcttaaaacatgttatttcgaaaaaagttacatttagcagttgttttttcttcggattactggtagagtaaaggtaattatttttgttcgaactatctttaagaagaaagttttgtaagagttttcgtcttggaagtttgttttagagcaagaatagtgaatttaagcgtttgtcgctttaggaggaaatttcatgttagaaggtaaagtaaaatggttcaactctgaaaaaggattcggattcatcgaagtagaaggtcaagacgatgtattcgttcacttctctgctattcaaggcgaaggcttcaaaactttagaagaaggccaatctgtttctttcgaaatcgttgaaggaaaccgcggaccacaagctgctaacgtaacaaaagcataaattgtttaaaaaaacctgccggtgtacgccggcaggtttttttcatctaaaacgaaaagctgttttgcaaaggcaaaacagcttttttatatcaggtggcaatatcccgttttaagaagacgccgaatgcaagcgccagaaaaataacgaagtaaatcacaagcatcacaaccgaaaatgtcatcgtcatcccctctactaaaggagtcccgttcatatattgcgacaaatccgtgttcgcaaataaaatatatttggtccattcaaatttcgcagcaagaaataccgtcgccgtgttccccataaccaatagaaaaatagaaaatccgaccgctaatgaactgttccggaataccgcagacagcataaacgccatcgtcgcaagcataaaagcggagacagattcatagacatatgttttagcgaggaaagcgatgatattttgctcaaaaacatggccgtctttgtatacgagatgaacatcagccgcagtatctccgcctgtaccgaaaaagaccaatcccaacagagcggagccggcaaataaaatcacaagcatcagcagtccgaacagcagcactgtcatatatttagaaagcaaaatctgaaaacggctgagcggacggatggccagcagcttgatcgtcccccagttgaactcattcgccacgatgcctgcggcaatgataatcgtaaacagcccggtcaaaacagtcatcatcgaagaatcagatacgtatgaccacactgtgtaccctgtatcctcggggatgttatgatccatacggtattgatttatcgcgacattctgtttcaggttatcaatgagcgtctgatttccggtttccttcatctgctgtttcatttctttgttttcagcctggagctcctgtttccaattcggattggcttcgttcgaggtgaaatggtttgacagaagcgcaaaaccgatcatcgaaacgcctaaaatcacaatcatagcccacgtgccgacgcggctgaaaattttaatccattcattatagatcagcttaaacatattgaacctcctctttcgtcccgccggtaatttccaagaaacggtcttccaaagattttgtcatgattttcacttcatataagcggatgttttcacggacgagcagtgatatcacatcaggcacttcctgtttggacagctggatctcaatgccgtttgtcttcttcacacagtcaaactgactcaaaacggcaagagcctcttctctttgttcaatatggaagaagtatgtatctttatcctcttttccttcatcccttactttttgaatatcgacaagctctcctttttgcagaatgccgattcgatcgcacattagctccatttctgacagaagatggcttgagacgatgacagccattcctttttcacgtgtcagctttttcagatggtccctgatttctctgatgccggcgggatcgaggccgtttgtcggctcatccagaatcagcaccttaggattatgcagcaggctttgggcgaggccgagacgctgtctcattccgagagagtaggtttttactttgtcatgtattctgtcctgcaacccgacgagctcgatgacctcatctattttttctttcgtaacgccttttaccatccttgcgtactgctgtaaatttttatagccgctcaggaatttgtacagctccgggttttccacgatggctccgacgtgcctgaccgcttttgcatagtttttcgtaatggattccccgcagattacgatgtctcccttagacagtttcattaatccgaccatcattctgatcgtagtggttttccccgctccgttcggccctaaaaatccaaacacttcgcccgcccggacggagaagctcagatcatgaataatcgttcgtccttttatcgttttctttacctgttgcagttctaataccgtttccaattagaatcccccttctatttcgtgcgcctgcatgacgtttctataccattgcagcacggacattccttcctgttcccgaatttcttcgacctcgcgccgttcagcgattttcccttttatgaaaaccatcacttcgtctaacagcgtctcaatctcgccgatctcatgcgtggcgatgacgacgatctgactgtcaaaatcaatataagatacgagactgttgacaatcgactccctgaccgccggatcaagacctgaaaacggctcatccagcagaatgaccgatgcttttctcgacagggccaaaacgattttcagcctgccccggctgcctttggacagctcttttaacttctgcttcgctgaaagattcatttccgctaataggttatgtgctttttccagctgaaaatccgggaattgcgaatgataaaacgtgagcatatcaccgacggtcgtccgggcggaaaacatatcatgttcggttaaataagccgtacgaaacagcatgttcctgcttactttgcactctcccatccggacggcgcccgatgtcggaaaagcaagccctgcaagcattttaagcgttgttgatttaccgcttccgttcggccctaaaattccgtagattttacccggagacaatgaaaatgatacatcgctgaccgcgatcctgcggccgtatttttttgttacgcgttcaaaatcaagattcatcgtttgcttcctccgcatattgtttgatcccctcgagcatttcctcaggagataaccccagctccgccatttcctgaataaagcgtttgaaaacgtcttttgtcagcctgtctttcagctctgctttcagatcggatctttccgctataaaggttccctgtcctcttctcgtctccacgatccccagcctttccatttcactgtacgttctttgtatcgtgttcggattcactttcatctgtacggccatctcccttacggacggcagtttgtcccccggtgaaagctcacttcggatcagccggtaatatatacgatcggcaatctgcagataaatgggcttggatgactgaaattcattctccatcattacacctcaacctttcgattcagcagtatagaggccagcgcgagacagagcgctgcaagcacgatcactgccagaaagctgaaaagcgaaatgtggacggctttcagctccatcgtccatccggacaatttcgtataatgaaaatgaaaattcgcatacacttttaccggccataaatcatgttgagatgaagtgaaaggcgtaatgattttatcgtcaatataggtccagacaaacgcaagcacgatgcagatcccccaacggaggacgggaaaatgttttaatgagtgaaaaacagtccaaaatacggccacgatcacagataagtacgctgaactgatcagcaggtaagcattcagcccggttaatgtgccggccaggggaatggtgtgttccagcactccttttgcagaaagcatccggtacatccaaatgccgtaacccgtcagcgccagctgcccgatcaactgatacagcagtgaggccgtcagcttggaagccagcagataaaatcccccattcggattgtaaagccacagctggttttttccttctttatgaaggtgataatacataaaaagcggcgctacaagaaattgaaaaaaccccattgccgtaaaaaagccgaaaatgacgagcggttctttctgacgggcagcgatgacgtgggctgaaaacgcccagcaaatcatgccgcaaagccacaccgcgagccaaatccatgaaactttcgcatcttttttcagcaaacctaaaaacgatgtcattctttctctctccattcggatcaagtgtatgagtaacatagtacactagatcatcacgtattacaatatcttcaataaaaaaaagacaaatccgctcttacgcggatttgccttttcaattacttctttttgttttttaaggagagcagcgcatcacgatagctgctatcctgcattttgccgccgctatcaggatcgtttggttcctgatccgtctcagaagtcttaaacttctgaagcgcctgacggtacacatcatcgcccattgtattctttttctcacggggagattcagattttacaacgacgggagcatgctcggctgagcgctcctcggccggatcatgcttttccggctgttcggctgtagtgccgatcgcttctctcttttcttctttgacatcctgtcctgcagaagtgctgcggacattgaaggtgataagaagtgcaatcacaatgacagcagcaataaccgctataataatggccatataaccctctccttactgtcgtccggcagttagattaccagtgacctggctgacacgtctgccaagcgcacggcctaattgaaggccttcttccgtcatcagcacatcgctgtcaaccgggcatgtgacgcccgcgccgtagtaagagccgtacagcgcgttttcaggaacgttgccgggaagaccgacaacaatcatgccttggtgaaacataggagtgatcagattgtgcatggtcatttctaatccgccgtgtgttgtcgccgtcgtacagaatacagcgccgactttatcaatcagctcgccttcagcccacagatagccgagtctgtcgatccacgcttttaagcctgaactgatggtgccaaagtgtcccgggcatccccagataatggcatccatgtctttcagcttgcggatgtctgcttgatcgacatggtcgatcaggacttcagcctcagcgttttctcgtgcgccctcggcaatggcttcagcaagatgttttgtgtgttcgccttcactatcgtacactacgtaaattttcattcaggaaacctcccattcagatgattaagattccttcacttctttaggggccggaagcaatgacagctcctcttttttcttcgcccgctgtttgtctttccgcacgtcacgcaagaacagactcaggactacgccgataaccgcaaagatcgtcgcccacataaacgcgtcattaatccccataacgttggaattgagtgaagctgttttgtagagatatgaataaacggtttgtttcgccgcatcaagcgacatgttcatgttgaccattaaattcgaaaccgcgctttggaacgactgcatgaagcttggatcagccgtgcttgttttatccgcaatctgcgaataatgcattgtcgtacggttcgtataaatcgttgtgatcaaacttgttccgattgatccgctgatctggcggagcgtgttgctcatcgccgtgccgtggctgttcaaccgtgccggaagctggttcattccggctgtcataacaggcatcattaacagtgacataccgaatgcgcggatggcatagacaagcatgatgtgcgtgtaaggtgtgtcaattgtcaattttgtgtactggaatgtcgttgcgaccgtgatgaccagcccgataatcgcaagcggtctcggaccaattttgtcaaacagaataccggaaatcggcgacatgatcagcatgacaatcgcgcccggcaatagcaagagacccgattgcagcgccgtaaagccgactaagttctgcaggtaaatcggaagcaggaacattcctgtgtaaagcgcaacggtaataatgatattaatgacactggaaagtgagaaaatatcatatttaaatacccggaagtcaagcatcggtttttcagagcgcaattgctgaatgacaaacgcggcaatcgcgatgacaccgacaatgacggtagacagcacgatcggatctccccagccgtcgctgcccgcttcactgactccgtaaagcaatgaggcgaatccgacaatagatagaatcgcacccaagctgtcgagtttgattttttgcggttccaccaagttcttaaagaggaaaaacgctatgataataacgattgccccgatcggaacaaggccgtagaacataatgcgccatgtgtaatgctcgatgatccagccggatagagtcggtccgaccgccggagcaaacatcatcgcaagaccgaaaatccccattcctttccccctgctttcaggcgggaagataagcagaatggttgtcatgaccagcggctgcaggataccgccgccgaccgcctgaattaaccggccgatcagcatggttgagaagttaggcgcgattccgcagactaacgttcccgctgtaaaacagaacatggctacgagaaagaggcttctctgtccgaaccgggtgattaagaacgcagataacggaatcaaaacaccgttgaccagcatgtatccggtcgtaagccactgaatcgtcgtcgcactcacaccgaactcggtcattaagtgcggcatcgccacgttaagaagcgtttggttcaagatcgccaggaataacccggccataagcacaataagcaatgttttaggactttttacttgattatctgatttagccacctaagacaacctcccttcatggtttgatgactgatctgtattattcagagatttttacagatgcgttcataccaggaagcaccttgtcagatgggttgctgagtgaaattttaacaggaactttttgcgttactttagtgtagttgccgcttgagtttgaagaaggcagcatatcaaatgttgaatttgtcgcataaccgatttcttctactgttccgtcaaatgttgtattaggatcgccgtcaacaattacgtctactttgtttcctacttcaatgtctctaatgtctgtttctttaatgtttgcagtgatgtaaaggtgtttcatgtcaatttcctgggcaattgtcgtaccggcttgcaccatttggccgtttttcacttcgtttttcacgattgttccatccatgatggcttttacgtcagcattttgctgtcctttaatttttgcaaccacgtcgtttttgcttacttctttcccctcatcaaggttccagtcagttactttacccgcagcaggagctgtgatagcagccatgtcgccggcaactttcgcttcatcggtttttacatagtgtgtgctttgataatagtagtaagcacctccgcctataattgcaagaacaacaatcaaaccgataatgttggtcagaattaaacgtcctctgttcattttgttttctcctttcgtttcttcctctatcattttgtggaatgatgataaaaatatgtggggatttttttattttccgtttttcactgcacagccgtttgcaagcttcgttaaactttccgcaagcttgcgcaggtactgcagttcagcggtattgagctgccggtataagaccgccgctttttcggcatattgaacagcagctttctttagaagttcttccccctcttcggttaactgaatcataacaacacgccggtcgtcgtgatagtcgctccgaaccattaggcggcgcttatacagaatatcggtcattctcgtgacagacgccggtttcagatcaagcgacaaagccagccttgaaagctgcgtgcttttgctcttatgtattttgaacatcagcagatactgcagcactgtaatatcaaaaggttcaagcactgtctccagaatcattttctgctttttgtaaatcgatctggaagtatcaaacagttgttcaaaactgagcaaagcgagctctgattcaatcaccgtattttcacctcattcccttaataatagttcacaagataaaatattaataaatgaaagaaggtttgtaaagagaaaagtttcattttttaaggattttttttatgccgttttttctctttatttttaatttaaaaaagccgggtgaagaaccgcggccgcacgattcttcactcggctttatatttaatacgatgctttgcttataccggcttcctcatttttaaaaaagcttttcagcgcttgaaatacgtccgatttctgtttcaggatgtagtatttaaatttatcatctttgacatttttataggcggacatgagggtggaatgcctgttatattgattgacctcaccgtaacagaacagattcgattttttcatgatgtcattgacgagctttacgcaccgggcgttatccgaagtcaggttatctccgtctgaaaaatgaaacggatagatgttgtagcgggcggggtcatatttttcatcaattaattcaagagacttccggtaaacggaggaacagatggtgcctccgctctcgcctttcgagaaaaaatcttcttccgacacaaccttcgcttccgtatggtgggcgataaattcgatatcaaccgtttcatactttgtccgtaaaaatcgtgtcatccaaaaaaagaaactcctcgccatatacttttcccatacgcccatcgaaccgcttgtatccatcatggctaaaacgacagctttcgattccggcttcgtcacatcattccatgttttgtatttcagatcttccggataaatagggtaaaacgacggcttgcctgtcatggcgtttcgtttataggccgacagcatcgtccttttcttatcgatattccctgtcagcccggttttccggatatcattgaactcgatatcggtatggacgatattgtccctttccttttgctgcagattcggcagttctaattcctgaaacagcgcttcttccagatccatcaatgaaacttccgcttcataataatcctcgcctgcctgatcgcctgctccctggccttttccggcgccctgctttttatctgcgccgtctcttgcgacgacatcgccgacttcgctgtcgccgtcgccttggccgacatgtttatttttatcatagttataacggattttatattcatcaagcgaacgaatcgggattttcacaacatcttttccgttggacataataatgctttcctcagtgacaaggtccggaaggttgttttttatcgcttcctgcactttcttttggtggcgctgctggtcgtcaaagcctttgcgatggagggaccagtcttcctctgaaatcaaaaaatttccgctgtcattacgggacatgaattcccctccttaaccgttatggtcgttttacatgtgtattccggcttggtcctgtttatgaaacaagtccggcgaaaagatttatttttatcttatgccggccggactctccaattgacaaacaattgcgaaaaacagacaaaagaacccgtccttttacagacgggcctctcaatgaaatcaaatatcagcggtttaacaagcttccgacatacttcagcagttcattagcgctagtcgaattatagccgtgttcatctattaaccttgccactacctcattgacctttttaagctgctgttcatccggcgttttggtggaggtcgtaattttcactacatcttttaagtctgcgaacagctttttctgaatcgcttcgcggagtctttcgtgcgaattatagtcaaagcgttttccttttcttgcataggcggatatgcggattaagatttcttcgcggaacgcttttttggcgttttctgaaatgccgatctgctcttcaatggatctcatcagtttttcgtcaggattcatttcttcacccgtcagcggatcgcgaagcttatttttattgcagtacgcttccacattatctaaataattgtccatgagagttttcgcggattcttcatatgaataaacgaacgccttctgcacttcctttttggcgatgtcatcgtactctttcctggcggcggaaataaaattcatataccgctctttgtcctcggcggagatggacggatgctggtcgagtccttcttttaaggaacgcagcacgtcaagcgaattgatggattccatattttttctgataatcgttgaggaaatgcggttgatgacatagcgcgggtcgataccgctcattccttcatcatggaattccttcttcatatcctccagatcaacggaattgtaaccttcaacgctttctccgtcatagagcctcatttttttgacgagatcaatatcagagcggttcggttccttcagccgggtcaaaatagaaaacatcgcggccacttttaatgtatggggggcgatgtgtacgtcagaaacatcactttcagaaatcattttttcataaatccgttcttcctctgacacctttaaattataaggaacaggcatcacgatgatcctggagtgaagggcttcgtttttcttattggcaataaacgagcggtactccgtttcgttcgtatgcgcaacaaccaattcgtcggctgagatgagcgcaaaccgtccggctttgaaattcccttcctgcgtgagtgacagaaggtgccacagaaatttttcatcgcatttcagcatttcctgaaattccatcattccgcggttcgctttatttaattcaccgtcaaaccgataagcgcgcggatctgattccgaaccgtattcggcaatcgtagaaaaatcaatgctccccgtcaaatcggcgatatcctgtgatttcgggtcagacgggctgaaggttccgattccggtacgtttatcctccgagaagaatatacgttcaactttaacatcctcaattctgccgccgtattcttcttcaagccgcatgacattaagcggagaaaggctgccctcaattctgatgccgtattctctgtagaagtcgtcgcgcagatgatggggaatgagatggagaggatcttcatgcatcgggcagcctttaatggcgtaaacagcgccgttatctgtcaatgagtaggcttcaagcccttttttcagcatggtgacaagagttgactttccgccgctgacaggtcccatcaatagtaaaatccgttttcttacatcgagccgcttggcagccgggtgaaagtattcctccacgagccgttccagagattcctcaaggccgaacagctccctcgagaaaaagctgtatgtctttttcccgtcatcctcctcgattccgctgtcttttatcatattaaaaacgcgagaatgagcagactgcgcgaccaatggattttcttttatgatctccaaataatcagcgaacgtcccttcccatttgagacgctgctcttcctctctgtacttttcaattttctttaatatatccataagaacctcctctatcatggttaatgcactagaaataaggtactttgttacaatctatgcggtgacgtgataatacatgcttttcgtttcttaaaaataaagacgttataaggccgtcattgacaagggtccggtgcaccgttcataatgaaagaaatacagtttcatccagactcggacatcaaatggaaaagcaaagaggaggagacatgatgaaaacgatcattttacttggggtcattctcacttttttagtatccatttttactgcgggttacgacagcaaacctgaaaacaaataacggcaaaagggtgctctttatgaagagcaccctttcctgtacaacataacaatgtttcatatttgaatatgttcttggacagttgatttttcatgagacttacagcttgtttgatactcgatttttccgattttgcagcccgggccgatttccacacgcttccctctgacgatgtccgcttccgtggattcgaggtaaattgcgtctccttcgatcaattcagcagaaagcatgccggctttccgtttaagaaaaccgggtttccgtctgacggtaatcgatgtgccgccgatttctttcacgcggcttcggtcataacgcaaatggatgtttacgtcccctgcgtttaacaatcccgccacattgatacatcctgttacatgaagcagctccgtctcgcaatcgccgccgacggtgagactgccttttatatgacactgttctcccgcggccccgccgccaatttcagcaagtcccttcagcctcatcctggcaaaacgcatggagccgccgactttcaatgtgccgatcacatttgctgaatgtgctgataaatctcctgcaacttcatgctctccgaaaattttcagcctgctgatctcggcatctccgagaaaaagtcccgtgccgaatatccggcagcgttcgctttgaagtccttcgccgacagttccttcccctttaatgcttacattttggtaggaaccgccggaagcgtgtccggctccgtacatttttaaatgactcaatttttttgtcgtttccattgcagctcctcctatcgtttcacgactttgttaaccaaagcggtaggatcacatgtaaaatcgccgctgtattccaccgtcccaatggtgcagcccgcgccgatccgcacatgatttccgcggactgtcttcgcgttcgtgtccgccaattcaatgatgtcaccctcaatcagctctgctgtcagcaccggggccggcatcagcttaaaacgcgtaagcacgctctttctgctcatcactttcaaatggcggcagccgatttctttcacatgactttctcccgcagccagcttcatactgacttcatcggcattcagcaggccgccgatcttgcatttgccttccgaacggaatgtctctgtctcgcaatcaccttcaatcccggctttcccggatatgaaaatatcatcagctttcacaccgccgccgaaagatgaaaatcccgcgacgttcagccgctccgttttgacatcacctttaatgacacccgttccgttgatacggatggattcagcttcggcactgccggaaattttccccgaaccgctgattgtcagtgtttgcgtcttgacatgtccgtctgtttttccgctgccgttaaacaaaaggctcgtgcactccacatcacctgacaccgtgccgctcccgttgatctccactgtatgaaaacggcctccttttgaacttcccgaaccgttaatgattaatttatctgttacttccattgatggtcctcctgcatccatttcgtttttaattcttccgatgccgcagcaagcgccacccgttcaaccactttgacagtcggttcaaataaaatatgttccgcgtctgcgatgaagcacgtcgttacgccgagctttcggagcatgacaagctccgtattcgctttcagctcggaagcctcatacgtcttcagcacccccgccgccaattttccttcctcaaggctgatattgcccgattgcaaaagcccttcaagcacatataaagacagcagcgcgcgggacgtgaatgtcacgccgtcttcgccataaacttgcagcgcggcttttgaaatcagtcccttttgaagcagttccgcagacgttatattgacatcagtcatttgcggagacagcatttctctcatttcatccagagacagattttctttcatttcctgtatttttgagatgcgttttaatatttccgctctcggaaaaaatgtttcctggcctgtaaacgtcgattttcggataaaccattcttcaggaattaaatttttccgtttccaccggtacagctgcccgtatgaaattgatgtttcttccagcaattcttttttagaaatcagttgttcctccatgaatccagctccttcgatgaacgtattgtaacataacactgttacgttgttaagcccggaaatataaaaatgccgtaaaccgctgctgcccgtcttttttattcaataaaaaaacgcccggatgcgggcgttttttctcacgtcaaatctctgtaattttgctggcgcagcgcttcatatacaagaatcgcggccgtgttggacagatttaatgatctcacatgctcggtcatcggcagacgcaggcagcggtccatattgttttcgatcaattctttcggaagtccgctcgtttctctgccgaatacgaagaaaaagtcttcctccgtatttgagtaatcaaatgatgtgtgcggcttttgaccgaattttgtaatgaagaaaaactttccgttttcatatgcttcaaataactcttccaatgaatcatgatatacgacgttgacgaactcccaataatcgagtccggcgcgcttcagcattttatcatcggttgagaatccgagcgggcggatcaaatgaagcgttgtgtctgttgccgcacaagtacgtgcgatatttcccgtattggccgggatttcgggttgatataaaacgacatgtaatgccacgatgttcacctctgttttttattccgcccaccattatatcattaattactcttttgtcgtatcatccgtaatatgaaaaaacgcatatctgatggaaggagtatacgccgttgaatcctcatatgaccaatatctcatcctgctgtcatacgtttgggcattgacgagcggcatattgcttttatcttttgcgaccacgatcgccgtatgattaaaacggccgtctccttcaaaatcatagcaaatgatatctccgggcatcagttcttcagctcttgatacttgcactgcgcgaagccctgccttggattgggccagatacatcttcatcgaatgcgcgaccgtccagctgtagctccacgagcttgccttcatccaccagcctgagcctctgttcggatgcccccgcatcggtgcttttccggcatgtaaacattgggaaataaaattggtgcaattatcgctgaaatttttataagcgggatttcgtttattccaaaacttctccgcgtactgcacggcagccagacggtcgtattgaaacgcccgcccgaaatcttcccgttcactccgctcatattcaattacgctgtttccgtcagaaaatccagccggttttttctttacttcccggtctttaatcaaaagctcatcatagagaaatgcagtccgttcctcaatctgctcttctaagtaaaggtgtccgtcatgctccttgcacaaatattcgaaatgaatcgtgtacatgacacataacgtgccgtcgtcctcaagactgcttttgacaatgacggcttttgccttcgctttcacgatatcaactttccgtttttcaaacagctctttttttctcgtcaggacctcaagatcgccggcctgcccattctgcctcatctcagttccgttgattaaataatgaagccgggcctccgctaaatcttcaataatatgcttcaagcgctccacccaccatacgattttataaagaaaaaacacttgaactccggccaagtgctttttctctatacatatgtcaggaccggccggttttagtcttctcagaaaccgataacagctccagtcccttttcaatttcccgtatggcgtcttcatcctgctccttttgaagcgctttttctaattcctccgcataatcaggatcaccgattttcccgatggcccaggcggccgtacccctgatgacggggcgcggatcttggtgcatcaaggccgttaattccggaagagacgaggcatctttaaaatgagccaaagctaaaatcgcattccgctgtatcggcttcttgccgcgccatgatcccgatacatgtccgaatttttctttgaattcgcggttgcttatggtcaaaagcggctttaacagcggctttgcgatttccggatcaggctccatctgcggatgaagatgaaaatctttccccttattaatcggacagaccgtctggcacgtgtcacagccatacagacggtttccgattttcgtgcggaactcatccggcaaaaatccctttgtctgggtcaggaacgaaatacagcgctgggcgttaagctgtccgggattgacgagggcgccggtcggacacgcgtctagacattttgtgcacgtaccgcacatatcttcaatcggcacatccggttcaaagggcagattggtgatcatttcagccagatagacgtaagaaccgtattcaggcgtggtgatcatgcagtttttggcgctgaagccgattcccgcccgttcagccacggccctgtcggacaattctcctgtatccaccattgactttgtgcggatatcctcatgtttgctttggagaaaattctccagcagatcaagcttttcccgcagcacatcatgataatccttccccaggaagctctgcaaaaaatgccgcgccgcccgtccctcgtgctcctcggcgcatctttcattttggaaggataagcaagggcgatggcgacgattgatttggctttcgggagaagcaaagacggagtaacccgtttttcaatatccggctcttcaaaaccggataaatagccgagtgattcctgaagaatcagccggtcccgcagactgtcgaacgtatcagccgttgtaaacccgattttgtcaactccgatgcttttggcgtattcgattaattcctctttcagtttatgaatattcattttttgcacagcctcctttctttgtgatcaggctcccgcacgggtataatagagttttatcatcccgaaatggagtgaacacacttgaacatcagtttagatccacttattgctgaacgggtgccggggatcaaagcggcagccgtcttatatgaacagatcgaagtcgggcctgctccgcaaatgctgaaaggccgcctccgtttatttcaagaatctctttactttgattatgctgacggcggtatagatgagcagccttttgttaaagagtgggcgtgtataatggaacagctcagtcccgccttttcaggacaaaaaacgccgatggagcttatgctcggcgatatttcccgggaacgattcattgaaagtgtgaattcagcccatgataccatactttttttctccttgaaatattcattgcctatcatggcgtatgacgccgcagaaatagatgaaccgatttcgattacaatcggagaaaaagaacacgtacttgctttctccgactctggcggcattttcggcggccttaccggacatatcaacacccgccctgtaacaatcggcacaaagaaaatgctgcagctgatctttttcccgccttcatttcatgccgacgcggcggatgagctgctatcatctttaaccaaaatgtttgaacaaattcacggaggcacgcataccgtctcttggctttcataaaaagacacgccttcgtgtcttttttcacataaaaaaacgcaatacttcgtttatcagagaaacgaaacactgcgttaataacgtatgtatggagcgggtgatgagaatcgaactcacgacatcagcttggaaggctgaggttttaccactaaactacacccgcatcaaagttttttgtcagtaccgatttgatgtttctaatattacatgtatatttttttttcgtcaagggaatgttaaaaaatttgtcgaaaaaaattcttttttcgtccacatgttaagttaggtttacattttgttaagaatctcatacaatataaaaaagaagaaaacttgaggtacgccctgatgatgaaaaataaagtaaaagagctgagagccagattcggctattctcaggaaacgctcggaaaagaagccggagccaccagacagacgattgcagcgattgaaaaaggagattatgtgccttcactcttattggcgcttaacatctgccgggctttctccctgccgatggaggaagttttctggctggaggaggagaaaaaatgagtttgaaaagaaaagcgtgttttcaccttgcactctacggattggcctgctggacgcttatttcctttatggaagcggcgccgcggatcgctcagtttttccaaacggaggggagcggtgcatttgagctgaatatcactccgtttctgctgtttaccgtttgtgccgcattgtatatctatgccgaaaagaaaaaacgaaacggcaaaaagcataggctagtgcccgatgaatttgaggaacaggatgaaagagaacgaatgatgacggctaaagcttgccgttcctcgtatatcgccgtttacttctcattgccggccgcagccgttctgcttttgttttatccgctgattcagccgcatctacctttttttccgattcttttgattttcattctgatgatgattcagcatttggcttatgttttcacttttcataagcacggcaaaaactccggttcatgacagatccggagttttttatgttaccagctcgcttttttcaccccgggaacccggcctttatgggccagctccctgaatgcgattctggacagtttaaattttctcatatatccgcggggccgccccgtcaccgtacagcggttatgaagcctggccggagcagaatcacgcggcagtttgctcagcgcttcccagtcgccttttgcctttaattctcttcggatgtccgcatattgttcaacaagcttctgccgcttgagctctttgattacttttgatttttttgccatttcagcactcctaacaaatcgtaataattacgttttgtatcatatcatccagatgagcatcgtgcaagctaagcgcttaaaaaggcgggtgaatacccgccttcactgccggcatttccccggaaatgaatccgcagaaagcgcccgccgtcaatgatccgccttgcgacgtcatcagactgtcgctttatttcctcttgcaaaatggtcgtttcccattgcttcacccactctgcgctcaagcttgttagtccgttcattctgaaacggcagaagcggaaacacgagttcagccagataataagcttcttccagatgcggatagcctgaaaagataaacgactcaatgccgagtgcctgatactctaaaattcgatcagcgacagtctgcggatcaccgacaagcgccgtgcccgctccgcctctgaccagtccgatgccggcccagagattcgggctgatctcaagcttcgagcggtcaccgttatgaagatcggccatccgtttttgtcccgatgaatcagcgcgccggagcgcagcctgcgctttcgcaattgtctcttcgtctaagtggctgattaatcgttcagccgcttcccatgcctcttcctcagtctcccggacaatcacgtgaagtctgatgccaaaacgcatcgtccttccttccttggcagcctgttttttaacggtttcaatcttttcttttacctgctccggcggctctccccatgttaaatagacatctgtatgtttcgcagcagcctcaattcccgcctgtgatgaaccgccgaaatataatggcggatgcggagactgttttggcgggaacaggaggttgctgttttccaccttgatatggtccccttcatatgtcaccgtttcgccccgcatgagtccgcgccagacggttaaaaattcttcagtcgccttataacgttcatcgtggctgataaacatgccgtctcccgccagttcataaggatctccgcccgctacgacatttacgagcaaacggccgtctgacagccggtccattgtcgacgccattctcgcggcgacagacggctgcatcagtcccggccggaccgccactaaaaatttcaagtcactcgtttcccccgctaaagcggcagccgtcagccacgggtcttcgcatgatctccccgtcggcagcagaacccccgtatacccgagtctgtccgccgcctgtgccacttgcttaaaataaagatgatccgccgttctccctcccgtttgcgtccctaaataccggccgtcaccatgcgtcggaataaaccaaagaatctccatatgaatctctccttttttaataggttacccttcataactgttccgccattttaatagtttccgttcgagcattctgaccaatgcatctgtcagcttgccgacagccgcaaaaatgataatgccgacaaacaccttatttgtctgtgaaaattgtctggcatccataatcatataaccgacgccctcgctcgatcccatcagttccgccaccacgagaccgagccacgcaatgcctagggagagcctgatgccgagcaggatattcgggagagatgccggaagaattaatttcgtcatctgctgataccaattaaattccagcacccgcgcgacgtcaaacagcttcgcgtccacactgcggattccgagaaacgtattaatgtatacgggaaaaaaagcccccaatgcgatcagcagaattttagatgtctcatcaaatccgaaccacaaaatgaacagaggagtcacggccaagtgcggaaccgtcctgagcatttgcagagacggatcaaggtatgcttccgtccgctttgaaaaaccgaccagcagcccggaaacaagtccgaggcccgcgccaagcagaaatccggcagccgcccggtataaactgatctctaaatgaccccaaagctcacctgaaagaagaagttcctgaaacgtctgcaagatgacgacaggcgacgagagcaccgcggccgagacgatgcccagacttgcgataaactgccatactgcgatgaccgcagccgggagtacaatccctttcatccattggtatgaatacttccgggatcttgccagagctttcttttctgattggcttattgcgccggcagccgttgatgcttctgctttcattacttgccatcccccgtttcaagcgcttttttaataaatgaattgtcgacaacgtcttttacatgaattttcttatgaatcgcttttgttcgatattgaaaatcagcggtttcctgctgggctttgacaatatcatcatcgatcggttcattgagaggctcagtattgttaagcacgtttctgacgactttcggatcaagatgtttgattttcgcatataaggagacggcttcatctttgtgttccttttgccatgtaactgctttattgaacactttcagaaaacggacaacctcatccgggtgttctttggaaaatcccgttctgactaatgtgaaaccgggagaatataaatctgtgctttctccgttcgccaatatttccgccccgtgctgcagcgtttcaatcgacaaatacggctcccaaatggaccatgcgtcaactgatttgttttcaaaagcggaaaccgcctcatcgggctgaagctggatgatggtgacgtcatcggcggaaagccccgctttatctaaagctttatagagaaaatcaaagccgctgctgcctttggctacggcgatttttttacctttcaattctttcaggctctgaatcccgctgcccttgtttacgagaatgccgtttgcctttaacccgtcctgagacagcccgatctctttaaaatcaattcccgccgcctgaccggaaatgaccggtgaattgccgacctgggaaaaatcaagcttatcggcggcaagaccttcaaattgcggaggaccgctttggaattcgacccattttacttttattccgtcttttttgaaggcctcttcaaaccagcctttttccttggcaatgagaagcgggcttaaactctgctggatgccgatccggatttctttcaccgttttcccgccccctcctgtcccgtctgcactgcatccggctgacatcatgactgctgcggctaaaagaatgatgatttttttcacttcgcttcgtcccttctatattccggacccatccgcaaaccggaggtcttccgttttctcaaattcagaaagcaccttctgccggacggcctgaaaatccgctgacgtccgattgcgcggatgcggaagctgaatcggcatcaggctgtgcagccggccgggctttgccctgaggatcgccagcttatcgcctaaatagacggattcatcaatatcatgcgtgacaagaatcatcgtcgtttttttctcgcgccatatatcaagcagcacatcctgcaaatgttttctcgtaaaagcgtcaagcgccccgaacggttcatctaaaagcagcacctccggctcacgcaaaagggctctggcgatggcaacccgctgcgacatgccgccggataattcgcgcggataagcgttctccgctccctgcagcctgacaacctcaatcagatcatccacttttttccgaacggccgggtcgttcatattgagatcggcagcgatgttttgttttaccgtcagccagggaaacagccggtgctcctgaaagataaatccctgccggatgcccggtcccgacacattgcggccgtttattgcgacagagcctttataatcggtatcaagaccggcaatcaattttaaaagcgtgcttttgccgcatccgctcggtccgatgacagtcaaaaattctcccgatgcaattgacagctcaatatcattcagcaccggcgttttccggccttcatgctcaaaagctttttcttgtatgctgatggttacagccatctgtcttcccctctctttctgccgcatgcgatcgaaaaacaaaaaggcccccatctccgattgcttgcagagatgggagccttcggcggtccgatcggcaacccgtttgtttttaaatttgaatatcatgttaattcaaattattccgacttgtcaactgttttttgtatgaattaaaaatgcgccttccggcataaacctgccaaagagcgcatcggctgtatcacgtatttacttccttttctttccgggcgattttcaataatgtctgcgcgttgttgccgaaaatgttttctatatcttcttcccgcatattgatttcccggcaggtcctcacctgctcctgaagatatctgtatacatatcctctcggaaatccgttcgaatccgtcccgaagatgatccgttcagcaccgattaattcagatgtctttcgaaacagaatttccaaatcaagccggtacggcatccacctcatccactgatttgagccggacgtgtcaatatacacattcgggcagctccagcacagctgcagcagttcctgataatatccggcgccgaaatgcggaatgatgaacggtatatcagcatactctctcgcgacgcgatagatggagagcgggttgatgttgcgatggctgacaatgcccccgctctccctaaaagtccgaagtgaattaatacaggcagtcttttgtcagccagatacgtccacagctttttcagcgacggatcatgaaactcgatgtctgtcagcggcccgaacagtttatatcctttcagaccgagctcttcaaccgctcttttcagctcctcatacgcatccttttgttccaaaggatgatatgcaaatccggtaaacctcgcgggattggcttgaataaacgccgccatccggtcattgctctctgctgttaaaaaattcagcacgtcaatgccgtacttatctaattctttctcccatcttgtcatcaaagcgatttcgccgtcatcgccatcaacatcatgcggatcaggaaaatcccaagtgagattcattctttccgaccgctcccggttataatcggaaaatgtcttatcgtttttgccgaaattaaggctgtacggcagatgaccgtgaatatcgacaggtttaaaatgctgccggaaaagcatacaatcgccgcctcccttaccgcctgacaataaaaaaaggcccttatccagtgaagaataagagcctcttgtgtccaagtcagcggtttctattttttctcatattaaacccattattcccgtcagtcaagtgtgttattaaacccataccttcttttcgataataaaaataattattttataatcattataaaataatattgactttttactgataggtgatattatgttcttataaatttaaagaggtgatcacatgagttcaaataaactgacaaccagctggggcgctcctgtcggagataaccaaaactcaatgacggccggcgatcgcggtcctgctttaatacaagacgtccatctgcttgagaaattggcgcactttaacagagaacgcgttccggagcgtgtcgttcacgcaaaaggcgcgggcgcacacggttattttgaagtcacaaatgacgttacaaaatatacgaaagccgcatttctgtcagaagtcggtaaacgcacgccgcttttcatccgtttctcaaccgttgcgggcgaactgggctctagtgacacagtgcgcgacccgcgcggatttgccgttaaattttatacagaagaaggaaactacgatatcgtcggaaacaatacacccgtgttcttcatccgcgatgccatcaagttccctgactttatccatacacaaaaaagagatccgagaacacatctgaaaaatccgacggccgtttgggatttctggtctttgtcacccgaatccctgcaccaggtaaccattctgatgtcagaccggggcattccggcgactcttcgccatatgcacggattcggaagccatacatttaaatggacaaatgataaaggcgaaggcgtctggattaaatatcactttaaaacagagcaaggcgtgaaaaaccttgatgttaatacagccgcaaaaatcgcgggcgaaaatcccgattaccatacggaagatttgttcaatgcgattgaaaacggcgatttccccgcatggaaattatatgttcaaatcatgccgttagaagatgcaaacacatatcgctttgatccgtttgacgtcacaaaagtatggtctcaaaaagactatccgctgatcgaagtcggccgcatggttctgaaccgcaatccggaaaattactttgcggaagtagaacaggcgacgttctctcccggcacattagtgcccggcgtcgacgtctcacctgacaaaatgcttcaaggccggttgttcgcataccatgacgcgcatcgctaccgtgtcggcgcgaaccatcaggcgctgccgatcaaccgttcccgcaatgaagtgaaaaactatcagcgtgacggacaaatgcgttttgatgataacggcggccgctccgtctattacgagcctaacagcttcggcggcccgaaagagtcacctgaagataaacaggcggcataccctgtatcaggtttcgctgacagtgtaagctataatcatcatgatcattacacacaagccggcgacctgtaccgcctgatgagcgaggaagagcgcgcgcgccttgtcgccaatatcgtcagtgcgatgaaacctgtggaaaaagaagaaattaagctgcgccagatcggccacttctacaaggctgatcctgaatacggcagacgcgttgccgaaggactcggactgccgtcaccaaaataacatcaaaaaacctgccggtctgcccggcaggttttttatgttcattatcaataaaaccgtttttttctcaattacacgaagtggcatgccgcaaaatgatgaaaccctttttctgacagcgccggacttttctcagcacatatcttcttggctgccggacatctcgttcggaatttacagcctgaaggcggatcagaggggcttggtatatcaccctttaaaattatccgctcccttttcgctccgggatcaggaacaggcacggctgataacagcgctttcgtataagggtgaagcggccgtgaaaagagctcctcctttgacgcatattccacaatcgtccctaaatacataatggcgaccttcgtacataagtgctccaccacgcttaaatcatgagaaatgaacaagtatgacagcccgtgctgtttttgaaggctgctgaacaaattgatcatctgcgcctggatggagacatctaacgccgccacgggttcatccataatgataaattgcggtttgagcgccatcgctcttgcaatcacgatccgctgccgctgccctcctgaaaattcatgcggataacgatcgatgaagtttgcggaaagtccgcaggcttcaagaacctccgccgctttatcacgcgcattccgcttcaccgccaattgatgctcgatcatcgcttcaccgatggcttctccgatccggcgccggggatttaaagaactgaacggatcttgaaagatgagctgcgcttccgatctgaaagttttgagctcgcgccggctcatccgaaacacatcacgcccctgaaaaaacacctctccccctgttttctcatgaagcctcaaaatggtcttgccgattgatgactttccgctgcccgattctcccgctaagccgaacacttctccctttcctatcgtaaaactgacaccgtcaaccgcttttacgggttttttatgagtctttctcatccccccatgctcctcgtaatattttttcagccccttgacctccagcaacacatcactcatctgctttctcctctctgtaaagccagcacgccgcctgatgccccttcccgaattcagtaaaatgcgggctcgatctccggcatatttccgtgctgtgttcacatcgctccgcaaaataacaagacgatcccgacaggtccgcaagctcggggacctgccccggaatggtgtaaagcgtctcccttttttgaccgataaccggcttggccgcgagcagccctttcgtatacggatgcttcggatcagaaaacagctctgcaaccggtccttcctccacaatttttcccgcatacatgacaatcacataatcagccatttcagcaaccacgccaaggtcatgagtaatgaataaaatagacgtgcgaaattgctttttcatatcccgcaataaatccaatatttgcgcctgaatggttacgtcaagcgctgtcgtcggctcgtcggcaatgatcagtttcggatcgcagcttagcgcgacagccgtcatgatgcgttgcagcatgccgccgctcagctcatgaggatatcggtgcataacctgctcggcattcgggatctccactaacgtgatcagttcaacggctctccgccatgcctctttcttactcagcaacaaatgttcgcgaatcggttcggtcagctgctcaccgattgtaaacaccggattcaaagatgtcatcggttcctgaaaaatcatcccgatttcgcttccgcggattttctgcatgtcttttggtttcagttccaacaggttctgtccggaaaaatgcaccgctccccgttcgattctccccgtctcgggaataagctgcataatggacaatgacgccatacttttcccgcagccggactctcctacaatacaaaccgtttcctcctcatgtatcgtaaagctgactccgtccacggcctttaccgcaccctcctctgtataaaaagccgtttccaaatgccttacttctaaaagcggttttttcatttcattttcacctgccgttttaccttaggatcaaaagcgtctcttaaaccgtctccaagcaaatgaatcgccacaacggtcagaaaaatggccgttcccggcggaatccacagccacgggcggagtgtaaaatccataaaatgattcgccgcttccatcatgtttccccaagaaggtgtcggcggagcaacgccaagcccgagaaaactcagcgcagattcactcagcatcgctcccgccacatgcaaagtcgccgctaccagtaataacggcaatgtgttgggaagcaaatgatagaggattttccgtttatcactaagccccaaaacttccgcggccatcataaacagctgctccttcagcgacaaaatctgtccgcgtacaagccgcgccaaaccgggccatccgatcaggcttaacatcatcataatcaggtacattctgtattcagaaggcactttccactccgacatcaccgcagccaaaatcaaaagcagcggcaggcccgggatggacatgagcatatcagcaatgcgcataatgatcatatcagcggctccccgataaaacccggccgcagccccgagtaaagagccgatgacaagcgacagcaccattgaagcaagccccacggtcagagaaatctgccccgccagcatcagcctcgtcagcacatctctcccgtactggtcggtgcccagccagtgatggattcccggatgctgattggcatttgaaatatccgtccgatctgttatgtacggagaaaaagacggcccgataaagcacaataaaaacataaaatataagaaaagaagactgatgaccgtcagcttatgctgcagcaggcggcggtacgtctgcttccaaagagaaggcggcacctctttttgttttttcattccgaacaccccctatttcagtctgacccgcggatcaaccgcggcataagcgatatccgccaagaagttccctacaatcgttaaacaagacaaaaacaaggtaaacgccatcaaaaccggataatcacgataatgcacagattcaagctgaatacgtccgacacccggccacccgaaaatctgttcaataatgatggctccggaaaacagtcccggcagttcaaaagcaagcagggtgatggccggaataagcgcgtttttcaacgcatgtttccagatgacggtgcgctctttcaatcccttcgctctcgccgttctgatataatcctgtctgatcacgtccagcatgccggagcggaaataccttgtcagcgagccgatgccgagcatagataaaatcacgaccggaagaatcatatgtctggcggcttcaagcacgtacgaaaaacctgtactcgtgctgccggtatcaatcatcccgccgacgggcaatattttcaaatccaccccaaaccacttaataaacagaaggctgataaaaaaagacggaaacgccatggaagcaaaaacaagaaacgtcacgatcccgtcaaaccatgagtatttcctgacagcggatatgacacccgttatcatcgcggctgaccatgtaacaagcaacgccaaaaacgcgacaaaaaacgaattccagacatatttccgaagcagtgacaggacgttctcctgatatttcaaagaaaacccaaaatctccgctgagcacatttccgagccatgtcacataacgctgccaaatcggctgatccagcccgtaaagcgcttttaactccttcgctctttccggagtcaggtttacattggaatcaatatagtcgcccggcagcatggcgaataagaaaaaaataataaaggacgtaccgaataagatcacaagcatttgaatgaatcgttctgcggcataccgtttcataaaaagcccctcctttccgctgaaagggcaaaatccccaggatgcatcgggtattttgcccaaccgttctattgaattgagacatttgagagacttgaactgattccagaataattgtcagcctcaagcccttttatttttccgctgaccgcccttgcgctctgacggtaatgaatcagaatgtaaggcgggttttccccgagctcccggtacagctggtgataaatctcttttcttttgctgatatcaagcgtgccggctcctttctctatcagccggtccgctttcggattggaataccccgtcacattattgggatggccggaagccagcttttccaccgtgtcattcggatcaaggatctgcgaggtggaaacggcggcaaggtcatattgtttgtcattgattttcgctacttctgtattaaaatccatcacttccggttttaatgagattccgatgtccgcataattttctttcgctatcgggatgaaatcatcatccgctttagatgtgtaatagctgatttcaagctttttgccgtttttttcacgtacaccgtctttgcccgttttccagcctgcttcgtcaagaagctttttggctttttcagggttaaacgcataccgattgacacctttgtcatcataagcccacgaaaccggagacaccggaacattcgcgacctctccgtagcgtttaaagcggacatcgacgattttttgacggtcaagtccgtaaataagcgcctgggacactttcttatcttgaaaaggcggacgcttgtgattgacgtacacaagcccgtaatcattcacgacagatacgcttatattcgcaaaaccgagactttttaaatgctgaaccgtatcatcatcaggtgagaaagaagcgtaatcaaggtcacccgtttcaaacagctgaagggaagttgacggatcgataattttataaatcagcttttccgttttcggttttccggcataatagtgttcattagcctgatagcgtatttcctgtcccggaaggtattctgtaaattgataaggtcccgctccgagcggtttggcataaagctcttttaaatagtccagtttgccgaattgatatttcttcccgtagtaggcttctgacagcacctgcccgcccaaaagaagcagcgacttcgcactgactttctcagtcgtgatttgaatggttctgtcatcaaggacgcgaatgccctctatcgtctttgcctttccttctttgtaagccttaccgcctttaatataagccgtggtgatatcttcatagcccgcgtatgcaggatcatgcagcagtgttaaagtgaatgcggcatcctttgcggtcagcggtgaaccgtcgctgaaaacgagattttttcttaaacggaacgtgtatgtaagctgatctttggaaattttccagctttccgcaagagccggggcaggcttccccgttttatccagtttgactaacggttcaaaaataggatctgtcgcatttccatcccagccgttttcgtaaaagtacggcagaaacacgccgcccggcgcggaaatcccagcaacaaaagtgtcagttctggctttcgatttagcgggaatcgccgccggatgagaagctttaaattcctttgtcttgacatgggtgatacgtgtttcttcctttttatcagccgcagatgacggttcttccccggcactccctaacgcgcaccctgataacatgatggataccgacagcgcgagtaccgttgttttcaacctccattttctctccttcatctttatcgaacccccgcatgcttttcatctatctttatataaatctgctccatctgttcctcatttctcataatctcccgtttgtttttctctacaagcagttcgaaattcaatgtgtgttttctgtactttttccgcttttttctctttttgcgcacatgtgataccttttttaacgccacttttcatccctccgcttttcatttaatgactttcacgcaaaaaaggcccttatctgtttaatagataagagccttcggtgatccgatcagccatcgtttggaaatatgtaatgattatgttaattcatacaatccctacctgtcaactacaatttaaaatatcgtgtccttccgggggttttcctcatacactctctcatttttccgcatatgctagaaaacatagcagattacaagtgaaagtgagtgagaatgtggaaaagacaacattgagcggtcgcatcgtcaaaaaagatgacccggactataatgccgcaagaaccaatttcaatttaagcctgcaaagatatccagacatcattgtgttttgccaaaacaaacatgacgccctcaatgcggtgagatgggcacgtgagaacaatgtgcctttccgtatcagaggcggaagacacagctacgaaaatttttccctgttaaatgacggactagtcattgatctcagtgaaatgaagaaaataagagtaaatgaggataagcggctggtctcgattgaagcgggagccgaattaggggaagtctaccggacactctggcggtacggcttgacccttcctgcgggaaccattgcgaatgtgggaatcacggggctgacgctcggggaggaatcggatatttaacaaggactgccggacttacttgcgatcgtctcctccagctcgaaatgatcatagcggacgaaaaagcgggtgctgacttgatcacagtcaaccgctcaaagcactctgatctattttgggcatctcagggcggagggggaggcaacttcggcattgtcacatccatgatgtttaaagccgtgccgatctcgtgcgtgtctgttttttctgtcacttggggctgggatgatttcgaggaagtatttaatacgtggcagcgctgggctccatttacagacaaccggcttacctcatcaattcagttttggcctaaggaagtcaaccgcatagaagcactcggtcaatttaccgggacaaaagaggagctgaaagaactgctggctccgttaatgaaagcgggaaaaccgacaagcggcatggtcaagacagtgccatttattaaagcagcagccttttttaacagcccgggaggcaatcagccgcaaaagatgaagcggtcaggatcctttattgaaaaaccattatcaacacgcgcaatatccactttaaagcgctatttagagcacgctccgaacgaaaacgccagtgtctggcagcaatctctcggcggggcggccggacggatcgctccggaccaaacggcattctactatcgcaacgcaatcattgcccaagaatatattacaacttggacatctgctgaagaagaaagacaaaatgtccgctggatcgaaggactgagaacgtccctatcaagagaaacgatgggagattatgtgaattggcctgatagagaaatcagaaactggctgcaaacgtattacggagaaaatgttcaccgcctccgtcaagtcaaaacgaaatatgatccggaaaatatattccgcttcgagcagagcattccgccgcttcgccgttcaccgtttttctaaaaaagatgaagatggatacactccatcttcatcttttcttttattgatataagcggcttcccttctctgcaaactcttttgctttttctttcagcccttcattgacggcctcgtcttcagtaagtccgttttccttcgcataatcacgaatatcctgagaaattctcatgctgcagaacttcgggccgcacatcgaacagaagtgagccgtttttgcgccttcagccggcagcgtttcatcatgatattccattgctctttcaggatcaagcgacaaatgaaattgatcacgccaccggaattcaaaccgcgccttagacagagcatcgtcacggatctgtgcacccggatgccctttagcaaggtctgcggcatgtgccgcgattttgtacgtaatgacgccttctcttacatcatcacgattcggcagccccaaatgctccttcggcgtgacatagcaaagcatcgccgtcccgtaccagccgatcatcgccgcgccgattgctgaagtaatgtggtcatagcccggagcgatatccgtcgttaatgggccgagcgtgtaaaaaggcgcctctttacaaatttccagctgcttgtccatgttttccttaattttatgcatcggcacatgacccggtccttcgatcatcacttgcacatcgtgcttccacgcaatctccgtcaattctccgagagtctccaattccgcaaactgcgcttcatcattggcatccgcaatcgaacccggacgaagcccgtcaccaagtgaaaaagcgatatcatagctcttcatgatttcacaaatttcttcaaaatgcgtgtacagaaagctttcctgatgatgagccaggcaccattgcgccataatcgccccgccgcgggatacgattcccgtcgtgcgtttagccgttaacgggacataacgaagcagtacgccggcatgaatggtgaaataatccacgccctgctccgcctgctcaatcaatgtgtcacgataaatgtcccacgttaaatcctcggcaatgccattaactttttcaagcgcctgataaatcggcaccgtccccacaggcacggggcagttgcggataatccattcacgcgtcgtatgaatgtcttttcccgtggataaatccatcatcgtatcagcgccccagcgaatcgcccacgtcattttttcgacttcttcttcgatagaagatgtaacagccgagttgccgatattggcattaattttcacatgaaaattccggccgataatcatcggctcgctttccgggtggttgacgttagaaggaataatcgcccggccgctggctacctcgtctctgacaaattcgggagacacatgctcgcgaattgcgataaactccatttccggcgtaatgatgccttttctcgcataatgcaattgtgttacatttttccccggcttggcccgaagcggtttccgctgcaggccggggtattcggcagcatgatcttcttttttatagccgttgtcttcaggtctcacggtccggccgttatattcttctacttctccgcgcccggtaatccactttgtgcggagcgcccccagaccttcatgaatatcaatctgtacatccgggtctgtatacggtccgctcgtatcataaacacggaccggcgcattctcctcttccccgaatgcccccgtagtcgcactcaggctgatttcccgcatcggcactcgtatgtcgggcgaagaaccttctgcataaacctttttactgccggaaaaactcgacataatggaaatgttcgcttgctgtactgattgattttgcatacaaatctctcctttatcatttgaataacagaaccaagctcagcaccagcacaaaaaaaccgggttcaaagaagaacccggttttgcagtcagaaagaaactattattgttttcctcaacaataataaaacctttacttccccacgctggtacgaaccagatcaggtccaaagggttaagaagccgccgcttctctctcagcccgctcagacgggcacccccagtaactattgatttcgctctcatcgtaacataagttgtgtacaaaaaaaagcatattatcaaaattcagataacggaatggtcataagctctgtttcccgaacgccttcttcggtattaaaaacccgataaccctttgcggtttcccgggaagagacagcccggaacagctgaccgtctttataatgaagcgcagcgccgtcatcagcggcatagccctccctgagtatcttttcggaaatcagacggtgatacaccggccggcgctccgcttctccgtcatagtgcggacaaaagctgcccggcaaaaatcctaaagctgttaactctcgcaaatcccccgctgaatccgtcaccccttcttcataccagcaaatcgctccggcgctgagacccgctaagatgatgccgttttcccaagcctcacgaagaataaggtcaagcccccactctttccataagacaagcatattgcgcgtatttccgccgccgacatatataatatctttcttcatgagaaaggatctgagatcagaacccggcggtttaaacagcgacaagtgatccggctcacaccgcagcttttgaaaggcctgataaaacctgccggtatatttctccgaatctccgcttgccgtcggcaaaaaacaaactttcggctttgaccgcgccgactgctctaaaatatactgatccagcacaagatgatccggctccatggaaaaccccccgccgcccattgcaataatctgcttcaatgtcatcacttctttttttctcaagtataacagctcattaaaaaggcgttatctcaatttcggataacgccttcaaaaagtatttgttatctgaaaaatacgcaccgtataacacaacggagatccccgcggcgttaatcgccggaacaagcttcgaacgggcatacttcgcaacattgatccccaacaccgtattatcactgaggggagaagcaaaccaaatgttccgctcgctaataataagctggtatgtaactgaaccgccagcgttacgccgagcgccccaagtccccaggatgacccgataaaatgggatataacagcccccagtataaaaagagacggcgcaataaacatatgagggctccatgatgttaaatgagaagtaacatatttcgagaatcccagattttcagctactgctgttacggcccaaatcagcgataacataataataacgttgaccaattcgtttccgcccttaataaaatgggtaacaagctcgcctgcaggaaagcgctgaaacataaaaagagcaaatactgcaataaccgctgccaataatgcgcgcttttgaatggccgccccaccagctgagaaacagtgttaatagcaaaaacagcccgatcggaaagatttaactccacggccgaatcggtgtttccttaatataagcacggtgcgccgaatccagctcctcctactgcaggtatcatgttttcacaagccttggagatattttcatacaacaaaaaaggcttctacaatatgtagaagcctttgtataccggtggccggggtcgaaccggcactccagaaggaacacgattttgagtcgtgcgcgtctgccaattccgccacaccggcatataatgcgtcgtgttcaaccgacgtatataaatataacatgcattctataaagagtcaatggttttagtaaagttttttcaaatggtaatgcagtatatacgatacaagcaagaaacttatattgatagtcttcacgcttttattatataaaaaaagcgacctgcaatatgcaaatcactctcatatatgttttataataagaaaattgatgaccaatttaacataattcgctcaaagttaaattggtgccgagggccggacttgaaccggcacggtagtcacctaccgcaggattttaagtcctgtgtgtctgccaattccaccaccccggcaatagaaaggcgacacccggattcgaaccggggataaaggttttgcagacctctgccttaccacttggctatgccgccgtaatttggagcggaagacgggattcgaacccgcgacccccaccttggcaaggtgatgttctaccactgaactacttccgcaacatgtaaaagaacttaatacatcttatgctgttgttttcaaaaaaatgcaactgggctagctggattcgaaccaacgcatgacggagtcaaagtccgttgccttaccgcttggctatagcccaatgataatatggggcgattgatgggaatcgaacccacgagtgccagagccacaatctggtgcgttaaccacttcgccacaaccgccataatctgaagatgaataaataatatagtggcaggggcagtaggaatcgaacccacaccggaggttttggagacctctgttctaccgttaaactatgcccctatttataaaatggtggaggggggcagattcgaactgccgaaccctgagggagcggatttacagtccgccgcgtttagccacttcgctacccctccatcatttagagtgccggccagaggacttgaacccccaacctactgattacaagtcagttgctctaccaattgagctagaccggcaaatggtggctcgggacggaatcgaaccgccgacacacggattttcagtccgttgctctaccaactgagctaccgagcctttttataaatggcggtccggacgggactcgaacccgcgacctcctgcgtgacaggcaggcattctaaccaactgaactaccggaccatttttttggttgcgggggcaggatttgaacctgcgaccttcgggttatgagcccgacgagctaccgaactgctccaccccgcgatgataatggtggaggatgacgggctcgaaccgccgaccctctgcttgtaaggcagatgctctcccagctgagctaatcctccatcatataagtgacccgtacgggattcgaacccgtgttaccgccgtgaaagggcggtgtcttaaccgcttgaccaacgggccctggtattttttcgtttgttatgtattgataattagtggcggagagcaagggattcgaacccttgagacggggttaccgcctacacgatttccaatcgtgctccttcggccactcggacagctctccataattggctccgcaggtaggattcgaacctacgaccgatcggttaacagccgatagctctaccactgagctactgcggaatgaagtctgcctggcgatgtcctactctcacagggggaaacccccgactaccatcggcgctgaagagcttaacttccgtgttcggcatgggaacgggtgtgacctcttcgccatcatcaccagacgttttagtgacatgtattattatactatgtatttcggaaaaagcaagagtttttttaaaaaattctctcaaaactagataacagtaagcatacattcaaattggttaagtcctcgatcgattagtatctgtcagctccatgtgtcgccacacttccacctcagacctatcaacctgatcatctttcagggatcttacttccttgcggaatgggaaatctcatcttgagggggcttcatgcttagatgctttcagcacttatcccgtccgcacatagctacccagcgatgcccttggcagaacaactggtacaccagcggtgcgtccatcccggtcctctcgtactaaggacagctcctctcaaatttcctgcgcccgcgacggatagggaccgaactgtctcacgacgttctgaacccagctcgcgtaccgctttaatgggcgaacagcccaacccttgggaccgactacagccccaggatgcgatgagccgacatcgaggtgccaaacctccccgtcgatgtggactcttgggggagataagcctgttatccccggggtagcttttatccgttgagcgatggcccttccatgcggaaccaccggatcactaagcccgactttcgtccctgctcgacttgtaggtctcgcagtcaagctcccttgtgcctttacactctgcgaatgatttccaaccattctgagggaacctttgggcgcctccgttaccttttaggaggcgaccgccccagtcaaactgcccacctgacactgtctccccgcccgataagggcggcgggttagaaggtcaatacagccagggtagtatcccaccgatgcctccaccgaagctggcgctccggtttccaaggctcctacctatcctgtacaagctgtaccaacattcaatatcaggctgcagtaaagctccacggggtctttccgtcctgtcgcgggtaacctgcatcttcacaggtactataatttcaccgagtctctcgttgagacagtgcccagatcgttgcgcctttcgtgcgggtcggaacttacccgacaaggaatttcgctaccttaggaccgttatagttacggccgccgtttactggggcttcaattcgcaccttcgcttacgctaagcgctcctcttaaccttccagcaccgggcaggcgtcagcccctatacttcgccttacggcttcgcagagacctgtgtttttgctaaacagtcgcctgggcctattcactgcggctctctcgggcttgcaccctaacagagcaccccttctcccgaagttacggggtcattttgccgagttccttaacgagagttctctcgatcaccttaggattctctcctcgcctacctgtgtcggtttgcggtacgggcacctctcacctcgctagaggcttttcttggcagtgtggaatcaggaacttcgctactataattcgctcgccatcacagctcagccttcacgggaaacggatttgcctatttcccagcctaactgcttggacgcggatatccaataccgcgcttaccctatcctcctgcgtcccccattgctcaaatggtgaggaggtggtacaggaatatcaacctgttatccatcgcctacgcctttcggcctcggcttaggtcccgactaaccctgagcggacgagccttcctcaggaaaccttaggcattcggtggaggggattctcacccctctttcgctactcataccggcattctcacttctaagcgctccacaagtccttccggtcttgcttcacagcccttagaacgctctcctaccactgttcgaagaacagtccgcagcttcggtgatacgtttagccccggtacattttcggcgcagagtcactcgaccagtgagctattacgcactctttaaatggtggctgcttctaagccaacatcctggttgtctaagcaactccacatccttttccacttaacgtatactttgggaccttagctggcggtctgggctgtttccctttcgactacggatcttatcactcgcagtctgactcccaaggataagtcatcggcattcggagtttgactgaattcggtaacccggtaggggcccctagtccaatcagtgctctacctccgagactcttaccttgaggctagccctaaagctatttcggagagaaccagctatctccaggttcgattggcatttcacccctacccacacctcatccccgcacttttcaacgtgcgtgggttcgggcctccattcagtgttacctgaacttcaccctggacatgggtagatcacctggtttcgggtctacgaccacgtactcaattcgccctattcagactcgctttcgctgcggctccgcatcttctgcttaaccttgcacgggatcgtaactcgccggttcattctacaaaaggcacgccatcacccgttaacgggctctgactacttgtaggcacacggtttcaggatctctttcactccccttccggggtgcttttcacctttccctcacggtactggttcactatcggtcactagggagtatttagccttgggagatggtcctcccggattccgacggaatttcacgtgttccgccgtactcaggatccactcaggagagaacgaagttttgactacagggctgttacctcctatggcgggcctttccagacctcttcatctacctcgttcctttgtaactccgtacagagtgtcctacaaccccaagaggcaagcctcttggtttgggctggtcccgtttcgctcgccgctactcagggaatcgcatttgctttctcttcctccgggtacttagatgtttcagttccccgggtctgccttctcatatcctatgtattcagatatggataccactccattacgagtggtgggtttccccattcggaaatctccggatcaaagcttgcttacagctccccgaagcatatcggtgttcgtcccgtccttcatcggctcctagtgccaaggcatccaccgtgcgccctttctaacttaaccgttaaaaagaatcactacgtgatatcttgcattactaattgaatgtgaattacttctgttatctagttttcaaagaacaacgcataggacatgctaacacatgcgttgccacaggaagtggcgcatttagcaggtgttcctatgttttgaaggaatgatccttcaaaactaaacaagacagggaacgttctgtttataagacccgaggtcttatattccgttaaaatccttagaaaggaggtgatccagccgcaccttccgatacggctaccttgttacgacttcaccccaatcatctgtcccaccttcggcggctggctccataaaggttacctcaccgacttcgggtgttacaaactctcgtggtgtgacgggcggtgtgtacaaggcccgggaacgtattcaccgcggcatgctgatccgcgattactagcgattccagcttcacgcagtcgagttgcagactgcgatccgaactgagaacagatttgtgggattggcttaacctcgcggtttcgctgccctttgttctgtccattgtagcacgtgtgtagcccaggtcataaggggcatgatgatttgacgtcatccccaccttcctccggtttgtcaccggcagtcaccttagagtgcccaactgaatgctggcaactaagatcaagggttgcgctcgttgcgggacttaacccaacatctcacgacacgagctgacgacaaccatgcaccacctgtcactctgcccccgaaggggacgtcctatctctaggattgtcagaggatgtcaagacctggtaaggttcttcgcgttgcttcgaattaaaccacatgctccaccgcttgtgcgggcccccgtcaattcctttgagtttcagtcttgcgaccgtactccccaggcggagtgcttaatgcgttagctgcagcactaaggggcggaaaccccctaacacttagcactcatcgtttacggcgtggactaccagggtatctaatcctgttcgctccccacgctttcgctcctcagcgtcagttacagaccagagagtcgccttcgccactggtgttcctccacatctctacgcatttcaccgctacacgtggaattccactctcctcttctgcactcaagttccccagtttccaatgaccctccccggttgagccgggggctttcacatcagacttaagaaaccgcctgcgagccctttacgcccaataattccggacaacgcttgccacctacgtattaccgcggctgctggcacgtagttagccgtggctttctggttaggtaccgtcaaggtgccgccctatttgaacggcacttgttcttccctaacaacagagctttacgatccgaaaaccttcatcactcacgcggcgttgctccgtcagactttcgtccattgcggaagattccctactgctgcctcccgtaggagtctgggccgtgtctcagtcccagtgtggccgatcaccctctcaggtcggctacgcatcgtcgccttggtgagccgttacctcaccaactagctaatgcgccgcgggtccatctgtaagtggtagccgaagccaccttttatgtctgaaccatgcggttcagacaaccatccggtattagccccggtttcccggagttatcccagtcttacaggcaggttacccacgtgttactcacccgtccgccgctaacatcagggagcaagctcccatctgtccgctcgacttgcatgtattaggcacgccgccagcgttcgtcctgagccaggatcaaactctccgataaagtagtttgactgactacgcacatcgctgtgcgatttatttaaaactttgaattaacaggtacgttttgtcttgtttagttttcaaagatcatctcaacctcatctcgaggcgactttttcagtataacatttcagcgatttgctgtcaaatgtttttttgtttttatttctccgccgctgtgagctttttggtgaagcgcatcagcgacgtttaataatataccatgcctatgattcagcgtcaacactttttttgaaagaatatcctcgatgatatacttcctgccctttggtctctatttgagatacttcaacaaagcctttttccgtcaggtaatcaagcatgacaccgagatcttgggtgaagtgcaccagttcagggtgctgaagcaattctccaaactgccacatttctttttctttcatcacctgaaaaaggtgcgcagaaccgatttcagcttttgaatggatgagaaaatcatttgctaagaataataattcgagccttttctccaagctttcgtgactctcgacaagttcggaatatagcttatatacctgcggctcaatgtgacggacctggttccagactgtcgtttcgggataaaacccccggtcaatcacttctatgcgggccaagtggtgaagagcgtgcactaccgcataatatgcatccagaaaatgatcagcttcaaaaaacgcttttccttctacaaatcttctgatcagcttgccgtattccattccgatctttaatttccgctcggcgaaaggaaaagtgctgagccggtcattgagttcagatatatattcattgcggtcaaacagcactttgccgttgatgatccaatctatgactcttctatttgtcccaagcagaatccattcctgaagcagagcatccgttacaatatgtaaagaagcggttttgtgttcgaattcataatgctttataaaaagaggttcatcagcctgtttcacaatgacaagcatgaccgcatcaaagttatccgtgatggatgatgctttactccttctctcaatcataaggacggccagcgtatcgggatgacttgctctttcttggtaaattggacggagaagattgtccattacgattcctccaatgcgattgtttcactagctattgtttctacatttctatgataaaacatgaaagtccttttttctaaacacattgcactattataacaaatttcctttcaggtgccatatttattcttcccttttcttacgaaaacatgaagaatatgccatatgttttgtgctatagttaaacgagagggggatggacatggcgaaatactcaagcaaaattaataagatcagaacgtttgcgttaagtttggttttcgttgggtttatcattatgtacatcgggctgttctttaagcagtctgttttgcttgccagcttgtttatgattctcggcctgctgtcgatcggactcagcaccgccgtttatttttggatcggcatgctgtccacaaaagcggtccgggtgatgtgccccgcttgcgagaaagaaacgaagattctgggcagagtggatatgtgcatgcattgcagagagccgcttacattggataaaggattggaaggcaaagcgttcgatgagtcttataacagaaaaaacagtgtaaaataaacgaagctgaccgtatcaaagcggtcagcttcgtttagtggttttcttttttggaacattcttggcagacgccgtaaatctccaaacggtggtggcttaccttaaaccctgtgacgtgagcagcaagctgttccacttcgtcaagcccgggataatggaagtccacgatttttccgcagctttcacaaatggcgtgataatggtcagaggtgacaaagtcaaatctgctggacgcatctccgtacgtcagttcctttacaagccccgcttcccggaatacacgcaaattgttatacactgtcgcaacactcatattagggaatttcccttccaaggctttatatatatcgtccgctgtcggatgtgccatagaatccacgagatattccagaatggcatgacgttgaggagtaatccggactcccgtatccttcaacgtgtctaaggcttcttttaattcatgtgcagccatccgtcatgcacctctcttctaaaaaagattcttactttataatgtttataattagtgtacatctttttccggtctcctgtcaaatgtaatctgaagaaaaccccgtgagttcagcatttgtccattaattagacgcaatttgttccaattcacgaagcgcctcggcaacgtgatctttcacttttacctttctccactccttcacaagacggccttctttgtctaacaaaaaagtggatcgctcgatacccatatattctttcccaaaattcttcttcagcttccacacatcaaaagcttccgccagtttgtgctcatcatcaacgaggagctggaaaggaagatcgtgtttttgcttaaatttttcatgtttatcacggctgtcagggcttactccgatgataaccgcatcaagtcccgcgaaactttcgtgctgatcacggaaatcacatgcttccgtcgtgcatccgggtgtcatgtctttcggataaaaatagagaacgacgtacttccctttaaaatccgtcaatgctacttcttccccgctgtcattcactaatttcatatccggtgctgtttgtccgatttcaatcgtcatttcttatacctccgggttttttattaagcgtatccaattcacgttaagattacaaccgttatcccccggctcttttctggaagcatgaacccgttgtgctcgcaatgaagcatgctacaatagaacatgatgtaaggagatattaggagggtcattttttgtatacaaaatcagttgaacttcataaggaagcgttagagcatatcgtcggaggcgtgaacagcccgtccagatcctataaagcggtaggcggcggttcacccgttgcgatggaaaaagcgaacggcgcttatttctgggatgtagacgggaatcagtatatcgattatttagcggcttacggtccgattattaccggacatgcccatccgcatattactgaagcgattaaaacagcggcggaaaacggcgtgctgtacgggacgccgaccaaacatgaggtcactttcgccaaaatgctgaaggaggccattccttcacttgataaagtacgattcgtaaactcaggcactgaagcggtgatgacaacgatccgggttgcacgcgcttatacaggccgcacaaaaatcattaaattcgccggctgctatcacggccattctgatctcgtacttgtcgctgcgggttccggcccgtctacgctcggcacccctgattccgccggcgtgccgaaaagcatcgccaatgaggtcattaccgttcctttcaatgatattgaaagctacaaagccgcgctggataaatggggttcagaaattgcagcggttctcgtcgagccgatcgtcggcaacttcggcatcgttgaacctgaagaaggatttttagaacaggtaaatgaattgacccataaagcgggcgcgctcgtcatttatgatgaagtgatcacggcgttccgttttatgtacggaggcgcgcaggatcttcttcaagtgaagcctgatttaacggcgctcggtaaaattatcgggggcggcttgccgatcggcgcttacggaggcaaaaaagagatcatggagcaggttgctccgctcggcccggcatatcaagccggcacgatggccggaaacccggcatctatcctatcaggcatcgcctgcctggaagtgctgaaggaagaaggcgtttacgagcggcttgatgagctcggcgccagacttgagcaaggcattctcgcccatgcggagacacatggcattaccatcaccgtcaaccgtttaaaaggcgcgctcacggtttacttcactgatgaaaaaatcgtcaattacgagcaggcggaaaatacggacggagaagcattcgccaagttcttcaagctgatgcttgaacgcggcatcaatctcgctccgtcgaagtatgaagcttggtttatcacaaccgcacatactgaagaggatatcgacgccactttacaagccgttgaagatgcgttcagacatatgaaaaaataacttctgaaacaagcgggagcccggggcttccgctttttctttttgtccgatttgtgagataatggttttttcaaaaaaagaccttgaataattggtatgatccctgtatattactttattgtttagcaaatcagccgacagggaaatgtaagtgtcagccgttcgttcggcacataatttattagagaaaggaatgcacgcacaaaccaatgaaacttggtgcccgcatttttaaaacagggattgcgattacgctcgcgctctacttagcatcatggatcggacttccgtcgccgatctttgccgggattgcagctatatttgccatacagccctctatttacaggtcttttcttatcattattgatcaggttcaggcaaatatcatcggcgctgtcatcgctacggtattcggactgattttcggaccgagtccgattatgatcggattgaccgcagtgattgtcatcacgatcatgttaaaactgaaaattgaacacaccatttcgattgcgctcgtgacggttatcgcgattttagaaacaccgggaaacagcttcctgacgttcgctctgatacgaacaagcaccgttattttaggcgtgctgtcttcttttattgtgaaccttgtgtttcttccgccgaaatacgaaacgaagctgactcatcatacggttgaatataccgatgagatcatgaaatggatcaggctgacgatgcgtcagtctacggaacactcgatattgaaagaggatattgagaagctgaaggaaaaaatgatgaagcttgatcatacgtaccttctttataaagaggagagaagctactttaagaaaacgacgtatgtaaagtcgcgcaagcttgttttattcagacaggcgattattacggcaaatcgggcgcttgatacgctgaaaaagctgcaccgctatgaaaacgagatttatcatatgccggaggaatttcaggagacgctgacagaagaaattgattatctgcttcattggcacgaaaggattctgatgcggacggtcggcaagatcaaaccgcatgatgacgatgctgaagaaagcataagatataaacagcttttgacgaagtctttcttgaaaaatcagcagaactgcgaggatgaactgcttgattacaatatgctcagcattatggctgcggttgcggaataccgcgagcagctggagcatctcgatacgctaattacgagttttcagacataccacccgaaagacagcgaattagaaacagacgaagagtaacccggtgcttccgtaaaaccgggtttttttgcattcaaaaaacgtatgccgcccattcggacggcatacgtttttgtatcagttcaaattctgaatcgtaaataagtgtctgtactggccgccttgggccattaattcctcgtgcgtgccggtttcgacgacggcgccgttttccatgacgacaattttatccgcgtgcgtaatcgtggacagtctgtgggcgacgataaaagtcgtccggtttttcgcaagcttttccatcgcttcctgaatgtagtgttcactttcaagatcaagagccgatgtcgcttcatccaagatcagcagcggcggattttttaagaatacacgggcgatcgaaatccgctgcttctgcccgcctgacaatttgacgccccgttcgccgactttggtttcgtagccttcggggaagttcataataaattcatgggcatttgccgctttcgcagccgcaaccacctcatccagagacgctcccggtttaccgatagcgatattttcacgaatcgtctcactgaacagaaacgtatcctgaagcaccattccgacttgattgcggaggcttctcgcttcataatcgcgaatatctgtgccgtcaatcagcaggctgccgccggatacatcataaaaacgcggtatgaggctgacaagcgtcgattttccgccgccgctcatcccgacgagcgcgacggtttccccttttgtcacctttaaggaaacgtcctgcaaaatcgtttcttttccttcctcataacggaacgagacatttcggaattcaacttcacccttaatgccgtcagcttttaatgcattcggtttatcagtcagttcatacggctcgtcgataaattcaaatatgcgatccattgaagcgatcgactgggtcagcgtcgtcgatgagttgatcaatcttctgaccggattgtacattctgtcaatatagccgacgaacgcaaccatcgtccctaccgtcagcgggccgtttatgacaaaataacccgcaaacgcgataacaagcagcggcgccaaatccgtaatggtattcacaactgcgaacgttttcgcgttccaattcgtatgacggatcgctttgtccagaaaatgtccgtttttttcatcaaaattggcttgttcataatcttcaatggcgaaacttctgataacgggcatcccctgaactctttcgtgcaaatgtccctgaacttgggcgagtgcctgagaacgctcacgtgtcagttttcggagacggccgtaaaagtatttcactgaaattccgtataacggaaacaaaatgacagatatcaatgtcagcttcacatcgagtgtaaacataatacagatgacgatcagcaccgtcatcatatcaagccagatattcatcagtcccgttatgacaaagtcttttgtctgttcgacatcatttatcacccgggaaatgacttcgcccgttctcgtgttggcataaaacctcaggctcaatttctgaatatgatcaaacaataccccctgatatcgtagagcacccggctgcccgtccattgtgcgaagtattgccgatagtactctaccgggggacgcagaattaaaaacagcacgaacatgatgcccattatcgtgaatagcgatgatgttttagcgcttgccgttccgctcccttgaataatgtcatcgaccacgtattttaacagaagcgggagagccagcgggatggagaattttataatgccgattaacactgtgataaaaatttgttttttataaggttttacaaattgcatatagcgtctgattacgcccacactttatccccctctctctttaaggcgtgtgagcccatgtgaaaaacctgttgacaccccaacaggttttttattgtattctttattttgtatagcgcagataccgttcataccacatatcaacaaattccggagcaaacggtcctttccgctgatgaatccaatgcagcagcgtattcagatactccttcagaatgctgtcgatctctttagggtaattcattgatttgcggtggtcatcgtattcatcctcgtcaagaatgttatacgtcatatccggaaacaccttgacatccaaatcgtaatcaatatatttgatggcctctccgtcataagcgaacggcgagctgatgttgcaataatagtgtaccccgtcatctctcagcattccgatgacgttaaaccactgacgggcatgaaagtagcagatcgccggctctctcgtcacccacgtccgtccgtcggattccgtcaccattgtccggtcgttggctccgatgatacacaattccgtactttttaaaatcgtcgtttcattccaaattcgatgaagcagcccgttatgcttatagctgtgaatttgaatggtttctccttccttgggatatcccatatttctcccctactttctgtaaagccctgcagtcaatgcagccgcaattgctttccgacaagtcttttcactattataacgttacgaattaaaaaatgaaaataaaagaaccactccgcttccggaatggcacattcatttctgcacataggaagacggcttttccgtgctgcgataagactggatgacttgctctgtctgcctttggaataactcctgtatgccggccaggtcttttcgctttgtcgcaatttcgtcctgtacattgtccagctttgcatctctttccagactgatgagttccgcttccacctgccggcagcggtcaagttctgactgcagctcgagaagctgatccatgattttcatctgttcacttacaagcttttcaaactctgacatcgggttcctccttaggctttaggttgatactccttaccatttcgattttacgccggaaaaccctttgactcattctgtagaggaatcacaagttttgtcgttttagcaacagaaaaaagcacttccatccgaagatgaagtgctttttcgtttcagtgattagctgttttgctgtttgttttgttcagcagattggttttgctttctaacctgctgcgcatcagtttcactgccgaattcagtgccgtattgaccctgaccggaagctgattgctggttttgtcttttcacctgctgaacgtctgttttgctgtattttgagtttgccattgttatcacctccacgcactttagaatgcgcaggagacgataaggctattcatctttttttaaaacttatacgagcagagagcgtccgccgtcaataatgatggtctggccgcggatcatgtccgcttttgaagaaactaaaaactccaccgtgtcgatcatatctttaatctcgaccattctgccggccggcgtattttggcgggcatcttccagcagttcatctctgttagggaaatgcttcagcgcgtccgtatcaatcgctccgcctgacaccgcgtttacgatgatgtttttcggagaaagctcaaccgccagataacgggttaacgattctaaagcggcttttgagacaccgaccgtcgtatagttttcaagatagcggatgctgccgagcgagctgatgctgacgatgtggccgcctccgtttttctccatcatctttgccgcttcctgggcgcagaaaagcaatgctttcgcgttgatattcatcgtccagtcccagtgtgtttcttcgagttccataaccggtctcagcacgcctgaagccgcattattgacgaacacgtccagtctgccgaatgtttcgtcaatctggcggaacatgtctttgatttttgccggctggccgacattagctttaataacgagcgttttaacgccgagtttttcaatttcttcggcggtttctaatgccgcttttttactgcgggcgtaattgatgacgatattgtatcctttttccgcgagtctgatggcggctgctttcccgacgcctcggctgcttcccgtgatcagtgcgcatttattttgttccatttttcctcagctccttgctgtgtatagttcttttcattcaacaaacaataaaagcaatatctgttgaaaggggtcttttatatgtatgtcggacgtgatatgggcgaattggccatgatgcccaaacaagattggagagattcagagctcgcctatttccatcatgccttccagcaaattatgccgtatttaaacgaagaaggccagtccaaataccgggaactgattcaggaaatcgaagcccgcggcggactgaaacggaatgaagcggattacggccacggcactcgcgtcagctatgactgacgctttttagcggccgctttcttccgccattttccatatcttttgatgggaaacgggaaatgcgtattccttgagctcctcttttgtgacccgtatgaattccgttgtatccgacacttgttttactttaccgaaaaagaccgaaatattccagacgagatgggtgaaaacatgttctacgatgccttccagctccccgatttcagcggttattcccatctctttttctaaataggcttcaagctgctctctttcggttttgattcctttctgggtttcggtattcggaaactcccacaagttggcgagcaagccttttggcggccgtttatgaatatagacatcgccttgttcgtctgtcagcacaacggctgccattgtttttattccgggctttttctttttgcttttaacgggcagctcccgctctgtcccttccgcaaatgccgaacagtgcttttgtacggggcaaagcaggcatgacggtgatttcggggtgcagatgatcgcgccgagctccattaaaccctgattgaattcagatggtttttcatgagaaatgaaagcggataccgcctgttcgaaaatggttctggttttaggttttgcgatatcgtcccatatggaaagaattctcgacatgacacgcatcacattgccgtctacggcgggaatcggtttgttgtatgcgatgctgagcacggcgccttttgtataagggccgacgcctttcagtccgccaaattccttttccccggcagggacgactcccccgtaccgctcatgtacttcttttacggcactttgcagatttcttacacgggagtaataacctagcccttcccaggctttgagcactttttcctcatcggcttcagcgagcgccgaaacggtcggaaattgctcaacaaaccgccggaaataaggaatgacggtatctacgcgcgtctgctgcagcatcacctctgacacccacacccgatacgggtcctgattttctctccacggcagaattctctgttctctttcgaaccatgtaattaagtcctcgcgaaatttgtctatatctttttgtttcattttttcttcaagtgcgttcatatcttctcctcagatgtttcgggttccgcttttcttgacactgtattttggtgtaaactaagggcacgttacgataatatgttacattaaatagtgataaagaaaaagcggaaacatatgagaacggcggataaacgccatgattgggcaaacagaaaatggggaatatcttataatgcgaaatatgcgggcggctgatttttaacgcctgctaggaggtcaacaatggatactggcactcacgttgtcatgggtatcgcgcttggcggaatcgcaactcttgatcctgccgtcggcatgcacaccccaatgtctcaggcagttatgatcgccgcgcttgccggctctcaggcacctgatattgataccatattgaagctgaaaaataatgccgtttatattcgaaatcatagaggattcacgcactccattcccgccgtattattttggtccgttctgattccgggcattttgtttatgttttatccggaagcgaactttttgcacctgtggctgtggacgcttctggctgtcgttttgcatgtgtttgttgacatttttaacgcgtacggcacacaggccatccgcccgttttcgagaaaatggatcgctctcggtttaatcaatacctttgatccgtttattttcgtcagccatttggccgcgattgccgtttggtatatcggaggtcatccgggcgtgacatttctgatgctttatatcatccttgcaggatattacgccgtccggtttttgatgcagctgcggataaagcgaaggctgcgcgaaatgattgaagaggagattgaaaccatcattatttcgccgacgatgaaattcaggcagtggcgtatcgccgtgacgacggcccatgccttttatgtcggcagaagccttgacggccatgtcgtgatattggatacattcaaccgcgtgcccgttccggaaaccgatgtgatgaaggccgcgaaacaggacgaaaatattgcagcctttctttcattttcccccgtttacaggtgggaggtcgatacttttaaagatcattatgaggtgcgctttattgatttgcgctaccggagcaaaggccactatccttttgtcgccatcgtccacctcagtcatgatttagagcttctctcttcctacacgggctggattttcagcgaggaaaaactgcagaaaaaattaaagctcggctctgtttaagagccgggctttttttgtcttctcacatataatgcggcaaacacgaggctgatcaccgatagagcggccgcgggtttaaaaaacggcgggtaatacgttaattgaatatcgttttttcctttttgcgctttaaatccgataaaggaataatccgctttttcaatctgttcttttctgccgtttatcttcagctcccagcctttttcatatggaatcggaagcatgatatacggcgcgctggttttgttttcatacgagatatgaagcgtatttccgcgccatctgagatcggcccgcggttctttttccgcttttcggtatgcgtttttcagcgtatcgtaccgttcttcgtaaagcgccagcctgtcaagctgatacgatcctttcggcagacggatttggatgttttttgttttcggcactctgacagtaagatcgttgacacctgttttgtaaatggattgattcgattttctcgttgtcgtgtaatcgttcacttttaatgtaaagccctggtccttcgctttattcttcaaataaaagctgacgtaataatcgccgccgtccatcttagcggcttgcggcgtaatgatcaggccgccgccgtcttcatttaccgtcaggatgccgtcttgataatccgcatggtcggccgttacctttgcctgacggatcatatttttcgcctcaggcgcttttttcgtgttggctgcgcttgattccgtgatgatcccgtcaagcattgcccgttctctggcaagggagggcgcttttttcagaccgtcctcgttatatacgcgatcagctgtccgtacgaacggaagcatatattgattttgataaaccgcataatgggatgattccatgatttttttgaacccgtacggcacgccggccccgtttgttttttccgtcatataatattttccgtaaagcaggctgtataaattagccctgtttcctaatgtcgcataacggctgacgctttccctgcccatgtcaatccggaggtcgttccagtaaaaggacagcagattgcggttcagtatgcttgaatatacgctgaatccgttgaacccgtatatgatcggagtgttattgaaaacaccgttcatccaatccaaacgggcaaacggatcagggtctttttctttcaggcgctgaataagctctgtttgttctttgcccttatagtcaggacccgtcataaaggtatgcgataccgtataaatcttcccgccttctgataacgcatatttttcatatgtattagccgtcagcaccgccgtcaagagaatgacggcatagacggcggacaccgcgcctttcagtcttgtctttgctgcaaggaaagcggcaatggtcagccccagaaggagcaggataggcaggttggcctgatcagaaatatccaggctgaaccgtctcacttggctccaatagagcagaacggcgagtacggcggatatcagcatactcttcatgctgatgtctgaaagcttagaaagccctgctgcaaccgttccggcaatcgtgaagcacaggacgtattcaaacctgttttgcggagctgaaaaaccgttaaaggcgcttgccgcaaacggactgaagtgaaacagaatgtacagcagactgattcccgcaaacagccggaacagccggtttttatataaagaaaatgtaaatagaaaaagtaaaaaaaccgccggcagaatgattatccggcttgaaaataaaatgttgtcggaaaaatcaagccatgcaatttgctctgaatacggcggccgcagattatgaagatatccgtatacgacagggataaaggaaactgcgcttatgccgaacccgagaaggcccgacagaataaatatcctgcattgagcgagccttttcgcctcattgccttcaagggggatcatccacctgaataagatataaatgccgatgaaaatcagattaatatacgcaaaataaaagttgttgatcaatgtcagcgcacaggcgaagataaaccacgccggctttttttccctgatgattttttccgcgccgagcacgagcagcggcagccacaccatactgtcagtgaaaaagtcccaatacacctcatgccggaagtagataatcgagaccccgtacaacacggcgccggcaaaagcaggcaccgtccgtttgacgaaatagcggaacacacacgccgccgtgaatatgatgaaactctgcttggcgatgctgataaaaacggaggcctgcgcccaaaacagcgcatcagcctcacccgtcagctgaataagctgcaaaaagcggacagcggcggagataaacaggaatagaaaagaagtagagaaataatagccgagctgactgtacactcccccgcccagtccgaacgaatagctgtaaaacagcctgccgttcatatattgatcaaacagcagctttttgaagaccgccatttgggcgatcccgtctccagaccccgtcatatagcggccttccgaccactcttttaagaaaaaaatatgagcggctgccgcagccagcacacaggctgccggcaagatccatttattttttttcatacaacgtccccagaccctgcgcacagcggcggctgtttaatggttccacttgcgcttttttgtataattcgtttcattttgttctccgtacgttatattcgcttctttaattaaatagtgcgggcgtttttttgtttcatagtaaatccggccgatgtattctccgatgatgccgagactcaaaagctggatgccccctaaaaacagcacggcggaaataatggtgaagtatccgggtacggacacgccgtgtgtcagaatatgaacaaaggtcgttacaatataaaccatcgacagaagcaatatcagaataccggtgaaaaagcataccctgaggggcttgttgttgaaggagacgacaccgtccattccgtagttgaacagattgctgaatgaccatttggacgtgccgttcttcctttcgacattttcataaaatacgattttctggtcaaacccgatccagcagaacagccctttcgagaaacggttcccttcactcagcttcaaaagggcatcaacggcctgccggctcagcaggcggaaatctccgaccccgtcacgcaagtccacttcgacggctttgttgataaatttataatacagggaagaaagcacggaacgcacggggctgtccccttttcggttgcgctgcgcgatgacttggtcatacccttcttcatagccttgaatgaagtctttcagcagatgggtcggatgctgcagatcggcgtccatcacgattaccgcttcgccctgcacgtgttcaaatcctgccaaaatggccgcttctttcccgaagttgcgggaaaaagatatgtatttgacgcgatggtttctggcggccagttctttaatctgctgaagggtgtcatccgcgcttccgtcattgatgtagaaaatttcatagtcataatgaatcgtctgaaattctttttttaaagattcatggatgagcttgacgttgttcccttcattgtaagacggaataataattgagattaacctttgtttcatgaaggcaccttctttgtattattctttttttaggacggccttaaaggaattgtccgcaaaacttcagtaaggcttttcctttttttaatgacgtttaaaccctttttttgttacagggaaagaaatttttttctgcatatgatttatattttgtcatgtttttcggcagatatgagaaaaaaaagaaaaagtctgtacgcgggacagactttattgctgaaggtattcatgaatcaaatggctgacgatgcgcggtttttcgtgaatgacccaatgtgaggcatcatctatgaagattaagtcgccgtttggaatcatccgttttgtttccttggcgagctttttgctcagcgcgcggtcgttgacgccccatattaaccggtacggaacgggcattttaagcggaacggcagggcctaaaccgccggctctgatcgcccggtaccagttcagcatcgccgtgagcgctccttttctgccccatgcttctttgtagctgtcgacatcttcccgtgaaaaaagcgccgggcgttcagataagccgatcgcgtgatccaatacgcggtaatcgtcttcagacaatctccgttccggcttttccggaagctgaaagaaagcgatataagagcttttcttccactgcggcgggtagaacggtgtgaccttccgcataaccgccgggtgcgggatattgaccgtgatcaatttttcaacgttttgcggccgcgtggatgccaaatgccaggccacggctcctccccaatcatgtccgatgacgacggctttgtcatctgtaaaatgagtgatcagcccgataatgtcgtctctgagcgtatcaatggtatagttttcaatgccctccggtttgccactgagattatagccgcgctgatcaggcacgacaacatggtatccggcatccgccagcggtttgatctgactcttccagccgtaccagaattccggaaacccgtgcagcagcaccgccaaaggaccgtctttcggaccggctgaagccgtgtgcagcgtcactccgtttgtttcgatcatgtgaaacgtaatgtcattcatcgattctcctccccgtttgtttcaatcttctttctgttaagacgatgatcagtacgctgatcgcgatcaacaatacggcctgaacgatcagggcgaacggctgagtcagccggataagcaggctgcccgcaaatccagctgccgccgaaataaggccgaacagaatcatgaggagcgcactgaatcgattgccttctttccactgcgactcatccgccatagagcgcttcgtccgatatccgtacaggctgttgatcgacttcggcggaaaaaacgtgactgaaatgccggccgcagccatcagaaggccgccgattaccattatcatatccgtcactctccttttcatcttttacgaaaggaaaggcgaaaggtttcagaaaaaaagcaggcttattcgcccgcctgaatctttacttttgagttaagtcggccgtttttacataacctgctttcccggcgtatgtgacgtacgcccatttacggtcaaatcctccgtcatggctgaacccccagccgagcacattgacggtttcacccgctttaacagacccttttttgccggtttccaaagtcggcgtataaaaatcggtttgtttcgcggtcaccgccttcaccggctgcttcatcagaaaatgcgtggaaatataggctttgtgacctttgtagtcaatttcagcccaatctgctccttgaagccgtttaacctttacggaatcctctgaacgaagcgtgccgataatccgcccttgtttattgggttctttgcggacgttaagttctcctgctttcacgatatatgtatctgctgcggtgtctatttttgtctgatgaactgctgcggcattcgctgccggatcaaaaaaaacggtgcctgcggctaaaaataagcaaagtcctgcggccggaataaatgcggttaacccctttttcatgttcattgtggttcctccccgctattttataagttattacacatttccacattccgccggtcgtcaaacatgattttcccatttcttttataaaaagaaaaaaccgccggacggtatccggcgggcgcactgctatattaatgcaggagacccctgctttgatccaaataatgagaaacgtcttcccgaacgctttggaacatatggagcttgctgccgtatgattcgatccattccttgacgacgcgttccgtcatttgctctccttggtacgggcggccggcttttgcgtaagtcgcttcgaaatctccccataaaagctcaacccaagtccgcgcttgcaaatagctgagcatgtcatttttctcaagcagcaaattcgtcagtttgtcgatatatgtattcatgtctctgtctcctttccttgggaaaacctgctgcttttacgcagcttgtcacaggcatatactaactttacgtcttcagtccagaaggcgcaaccttttgatattggccgagggggaaaacaaatggtccggaacaaggcaaaaggatttcctaatcagaacaataataagtttgaaggcgaaccgcgggcaaaggatgactacgcttctaaacgggcggacggttcaattaattcgcacccgcaagagcgcatgagagcttcaggcagacgataacacacaccgtaagagaccgggaatgacccggtcttttttttgcggaaaaaaacatcctcttgcggtcataacgctaaataaattccataatatgttaaatgctaaaccgcaagccggtagacaaaaaaggaggggttttataaaatgaagacagtttcaaaacgattgctgagccttaccgcattcttactgtcagtttcattatttgctgtttcagcagaagcagcgggcagcccgcagacatctgtatcaaacagcggtgaggagtttgacgcaaatcagaatcagcctgtacaaacaacacagacatcccccgcttatgaaggaacgggcctcaccaaaagacagcttgcacaaaacagcaaagctgacatcaagtcattaaagccttccagtattattgggacagacgaacgaatcagaatttctcccacaacatcatttccatatcgcgcgacagcacagctgaccgttacatacagcggcagcacaagcacctacggatgcaccggtttttttgtcaatgctgacacgatcgttacggcgggacattgcgtgtatgatcagaaaaacggctgggcatcgaaaattacggcagctcccggccgcaacgggtcatcgtacccgtacgactcttattcaggcaagacattctacagtgtcaaagggtggacagaaaacggtgacacaaactatgactacggcgcaatcaaagtaaacgggtcgcccgggaatactgtcggctggtacggctatcggacgaccaacagttccagtccggccgggctttcctcaaccgtgacagggtatccgtgcgacaaagtgtccggttccatgtggtcggacagcaagccgatacgttctgccgagacatataaactcacttacacgacagatacgttcggctgccagagcggatcgcccgtttaccgcaattacagcgacaccggccagaccgccattgccattcatacaaacggcgggtcgtcttacaatctgggaacaagggtgacaaacagtgtattcgacaacattcaatattggtcaaatcaataaagcttttgtcttctttctcgcggcagccgttttatgcggatgcggcaaagcggatgattccgccgccaaaaaagcactgcccgttacgctccatgttgagaatgcagacggttcaccggcggccggtgtgacggttaccgtgatgaaagcggcggagtcagatcatcagccgaatatagaccgcggagagataataggcaagactgatcaccacggtgagatgacatggaaaagcggcgcgaaaggaacctatgccgttgtttttgaaaaagacggggtaccggaaacccggaatatttccttagctgagagcgataaacatacggtgatcagcattacgttgaaacattgaaaaaagcttgcaggcggaatatcccctgcaagctttttgttatcctttatgcacttggtattcataaacatctttcttctcagacagatgagcgaacgtggaaagcacaaggccgagagccgtcatcagcgcaccgccggcaaacagccatgagtaagatcccgttcccccgagaatcaatccgccgatccaggcgccgagcgcgtttgccaggttaaaggcggaaacgctcaccgcagcggcgattgtcgtgccgttttcagaggaggaaataaccttggtctgcaaaagcggcggcgtgccgaacgcacatgcgccgaacaaaaatgtcgctgaaacggctgcggcgggaaaaacagcgatataaggaaaaatcgccaagacgccgatcaggccgatcatcacaccgatcatcgtgcgcgtcagcagtttgagcggcactttccccgcgaagaaattccccgccactccgccgagaccgtaggcaaataatgcgcctgtaatgccgactgtgccgaaccccgctgaatctcttaaaatcggctcaataaacgtgtaagcgataaagacgcctgagtagccgagaatggtgatcgcaaaggaaaaaatcacttgtttatgcttaaagacactccattcattcatcagcatcggaatcactttcggttttcggttcggtacgaccagcatcagtccgatcagcccgatcaggcctaaaacagaaataatgaaaaagacggcccgccagttaagggcatcccctaaataagagccgaacggaacgccgagcatcagcgccacggttaatccgccgttcatggaagccgcggcggcggaacgtttttcaggcggcaccatttcacttgcaaacaccatggcgatcgcaaaaaaagctccgtgaatggatgcggataaaattctggaaatcgccagcacggcgaagttcggcgcaaagacgctcatcaggttggcaagcacgaagatgcccatcaaccctagcagcaccggctttctcggcagcttaaccgcgataatagttacgatcgggcccgtcaggcagacgcttgccgcgtacgccgtaacaagcatgcccgctgaagatacatgtatatgaaagtcatcggcaatcgacgtcagaatacccataacagcatattccgtatacccgatggaaaatgtgcaaatcattaaaacaaaaatcattaatttcacagatggctgtttcattttgatattcaacgcaaatcgcctcctttttattaaaaaacaacgaattccatcttaaaagatatcaaaaatgaattcaatcattttttactgaaaggttgaaacgaatgtgcccgaaaagaaaaagaggccggaaccggcctcttttgttattatttttcttttaaaacggaaatcggcagtgcttcttccccgtcagacggggaagatc

SEQ ID NO: 9 - DNA, 1084681 bp, Bacillus amyloliquefaciens
tgtgtccccaggcgaatacgccgttgatgtaatcaatgcggaaagtgtcatcagaaccttctatctgatacaccccgccgggccgaaagtcttccgggttcagcatgtaagctttggccatcgtaattttccgttcaagcacggccagttcatttacaatgcccatctgttccgctttacgcgctttttccgtcagtcccgcaatttctgtctgtagttcatgaggcgtcatttgactgtatcgtttgtccatttcagtttactcctcttcctgcaagaattgatcaatatcgtcaatcgagaatccttttctgaataagtactgtttgaccttcattccgctttcatagctgccgtcatagcggtatttcctgatcgctttttccgcatgagccttcagagcttccatctcggcttcatcatcattttcatactccgtctgctccagagcggcattgatgacgtcgaaagggaaaccttttcgctgaagctgcatctgcgcccgctgtctgatctcttttgtggacagctttttgtcttttttgaggattttgccgatatgtttcagcgcttcttgtatctgctcatcaaatgtaaacgcgctgagcgtctccttgatggtatcgtcgtctattcctttcgctttcagctcgcggaacaggacgtcagggcctttgccgtttgtttttttgtgggtgctcgcataggcttcggcaaattctttgtcatttaagtagcggtaatcgtacagtttatggatgacttcagaaatgaccatgtccggtgtttcttttttcttcaggtgatcccggacttctttttcagaccgcatccgatatgataaaaattcaacggcgcggttaaaggcttttttcacgtcatcaccgtgctggatttcaagaatgtcaagctcgtccagttctttcccttttttcaggtcaaaacgcacaagcacgtcggcgtcgacgctgaatgcatatttctcatcaagaaagatgttgaagcgctcggtatttttcttttgggtcgatatttttgtaataaacggcatcccggtctccttccccgccccgatgttcaggcgtttttctttttggcaaatgaggtacagtatatgtatcaacgtgtaaggagagatggatatgaatatcgcgatgacaggcggcactggttttctgggccggcatctgacaggtgtgtttacccgccgggacatcatgtctatattttatcaagaaaacagagagaaaccgaacaaaaaaatgtgacatatgttcaatggctggccgaaaacgcggcgcctgagcgcgagcttccccctattgatgtatgggtgaacctcgccggcaaatccatctttgaccgctggacggacacaacgaaggaacaaatcatttcaagcagaatagaagcgacgagagaagtcagacggattatgaagcagcagccgaaaaaaccccgggctttgattcaggcaagcgccgtcggcatttacggcacaagcacagagaaaacgttcactgagcagtccgatacgtcaaatgaagactttctcagtcatacggctcatatgtgggagcgtgaaggccagaaaattgaagcgctcggcatccggacggtatatgccagattcggcgtgatgctcggtgaaaaaggcgccctgccgctcatggttctcccttataagctgttagcgggcggcaccgtcggctctggacggcagtggctgtcatgggttcatgtcgatgacgccgcggaacttattgcttttgcggcggagcatgatgacttgtccggtcccatgaatgtgacatcgccgaatcccgtagaaatgaagcaattcggaaagacgatcgcaagcgtcctgcaccgcccccattggattcccgtaccggaattttttctggagaaggccttgggagaaatgagcctgctgatcgtaaaaggccagcgcgccctgcctaagcaggcgctgacatccggttttcagtttacgtatgaagaacttgagttggctttaaaggatatcttatctgcataaaaacggaaataaaagccaatcctattggtattctgttttgaaggagggtcttcttttatggaaaagaagcgcgaaaaacatcagcagggagccaatctgaaaaaaatgcaggaagtcctttattccggtgaatttaaaaaagcggaaagagcagccaaacggaaataaactgaataaagatcggggccgggcagatactatgtttgtttgatatcacttttttcagggggcgattgatatgggcagaaatcatactcacaaaaaccgtgataaaaacaaacaaaaacttcctcaagttccggatgctttgaaacgcgaaacagacggcacgtacgaggaatattcaagcgagcttgctgattccgctgaccgcgaagcgcaggcgcggatgaaagccgctgacaacagagctaaaagcaaaacccgctaatacgaaatccccgcctctgtatagagacggggatttttttacaactcggtaaacaggctttttgccggcgtccgttctttcgccttaggctgttcatccggatagcccgtttgaatgatggcggcgaagcgctcattgtctgccagaccgaagtcttggtgcacctgtttgtcatacatgatgcggccgcttttccagaccatgccgatgccgttttcatgtgcgagcagctgaaggttttgaatcatgccgctcagcgccgcgaaatcatcgtttctcgtaaattcattttcatcttcttttaagacgacaagcaaaaatcccggaacggcgctgaggttttttctcatgttccgctctttttcctcgttgaaatcatcttttatttttttgaaaaatgagacgtagctgtccgcaagcttttctttacccgcttcgcttgctgcgtagataaaacgccatggctccgtcagtctgtggttcggcgcgtaaacggccgtttcaagcatatctaatatgacttcagaaggtacggtttccggcttaaacgaccggatggatcttctgtttctgattgtatgtgcaagactttcgttttgctgtagttgttcggttttcggcatgccgattcaccttcctattcaattgaaaatgattatcatttataatataacggatacgaccgtcttttgtaaaccgttacggaagctgaaaattgattgattcggcatacacggccgttcccgtcatctcgattttcatcttttcgttatcttctgtaatcctgatttccacttttccgtctttcccgatttcctggccttgttcaatcgtgaggcattcggcttcagagcctccgtattgccgcatataggccgccataacgcctgaagcggttcccgtgacgggatcttcggtcgttccggagaaaggggaagaaaaatggcgtccgtgcagatcactttccggatgaacggtttccagagaaaacggatgaacgctcgctttcggaagatcgcgcaaaacagcggggaattgtgcgttgtccggcaccatattccgtgatgcttgaagtgatctcagcggaacaatcagtgtccagatccccgttgatccgtaaacaatcggcagctcgctgtgaaaatcctcagccgtaatcccgagcgaggccgcaagcttttctttgtctcccgtaaacggcagaaattgcgggggtgcctgttcgagcgtgatgtatacccggccgtttcgttcagcggcttttgcgggaagaataccggcttttgtctcaatttgatatgtctgatcagcctgaagccttcccttttcaattaatgcgtaaagagaggcgacggtagcatgtccgcataaattcatttcgtggccgggtgtaaaatagcggatgcgcagatcggcttctccgcttttgcagagaaatgaggtttcattgtaccctgccatttcggcgatcatctgcatctcttcatctgaataatcatctccgttaaagacgattcccgcgggatttcccaaaacaggaatatcggtaaacgcttcatatttaaacacggttgcctgtttcattcatcagccttcctttcaccttatgatcatgttattcagtataacagagtaaaattagaatttttagttaattcttcaaaaaaaaagacgccttttaacggcgtctttttttggtttttccgatcaggcgggtgacgagaatcatcgtgacggacagcgatctgtttttacggtacgccaagtatttcccgcgccactccggtttgtatttttctttaaaggcccgcagcccgctgaagctgtacatataccggacgttgttgaaaatgacggccgcgattctttccgaccagaaagatgtaaaagccgttcctacgtttgacaaaggcgccatgcccatattaaaggtggtatagcctttttcctgcgcccagagaaacagacggataaaaagcgcgtccataataccgttcggcgcacttttccgataacgcatcaagtcgactgatatctcgccttcctgatacatcggcatcaggttggcaaaagcgatgatctccccttccgcgtctttcacgtaagcaatcggcgcctgttccagataatcccggtcgaagaaaccgagagaaaaacctttctcttttttcggtccgagccattcgtccgatatgtctttcagcttggcgataaactcggaggaaaacggcggttccccgacatgaaatgtgtagccttcgcggtcaaatttgttgttaatcgcccgcagccccgcttttttcttacctgacagcgtaaatgcttccatatccacgaacgcctcttctccgagcttgaagaagttatagccgaagtcatggtacagcgccagatcttcacgttcgatctgataaaacatgacactcagcccctgcttatgcgcttcattcagaaattcctcaatcacaagcggaaaagagtctctctgtcctgacggatcaccgagcacgacaagccttctggaaatctggccgaacaataaaagcgctttgccgtcgcttgagaaataaaaccgcttatccccgagaaagccgagatggctgagggcgtttccgccttcttccgccaaaaaggacttcagccgttcagggtcggccttttctccgatcggcttcgatcttttatgataaaagaccgtaaacaacaggaaaaacagcggcacaacaataatggccgtcatcgtggcatatgtaatgtgcgaattgttatgaacgaaataatcgtggcgcagcagccgattcattttatcccagataaagccggcaatgagattgtagttaaacaaggcgataataaacagagcggccgcaaaaatcatctggccgagcgtatacgatgcctgctctctgataaactgccgctttaacagcaccagcaatacgatgacgacaggcagaataaagatcgcgctgatgttcaatccttttaaaaaactgaacacaaaaccgccgaccagcgcggcaaccgccattgaataagaacgtttcgtccgtttgtataattcaatcggcaagattaaaagaatcaaagccgcgcttaacgataacgcgttaaacgcaaggagcgccgggcgcggaatatgcgggatgaccgtctccctgtcaatcggcagggcgacggatgccagcacaacgactcccgccatgaaaactaaaagcgacagcgaaccgtaaagcactctgattaagatggcgcgctggaatacgagaagcacgttcgtcgtttccacggcgggcgccatcttcggatttgattccagccgtttaagcgtattttccgttaaatcgccggccgcaaagaacagcccgaacacaaacggaataaatgaatacacaatccggtagatgacgatggatgtcacaaccgcctcctgcggaaagcccatattctgcataccgagcagaaacagaaggtcaaacgaaccgaatcctcccggcacaaggctgatgattcccccgatagcggcaatggcaaatacaccgaatacatggcggacatccgcgtgaatccccatgacatacagggaataatacatgacgacggccgccgcaaaccattcggcaaacgatgccccgatgtaagaaaaaaccggatgcctcggttttgcttcaccgtcttctgcgcgagcttttttattgttgacccaagcggcgattaaggctgccggcacaataagcgccactccggcgattacagcccacagccacggtttctcacctgtaatctctccgaccggcagaatgcgggcaatggtcaggatactgaagacggacagcccgagcagcgctgaggacgtaagccaggcgatgcctgcgacaaggcgttttacgtcattcgtatgctctttgtaaagcatcgtccgcagcccgacgcccgccagaccgccgaatccaaggacattgttaaaggaattggcgataaaggagaccctgaatactttccaattcggaatgtcgaggcgaagcgtccgtttcagcacaaagtcataaaaggacatcgcgctgacggcaaggagaccgagcagaacgagaataaataaatcgtaacgctcaatcccgttaataatatacagcgttcgtttaaaagaaaggtctgtcaattcctttttggactgataaatgactaaaagcaaaactgcaataggaaataatacttttaatatcgataaggcattctttttagtcagcaatgttctctccaatcatcataaaatagcttatttattataattcccccaataatctccaacatattatacactaccacctcacattcaaacaaaactcgtctgcaactttctttctctgattaaaatcagtaatatggtatgcaggagtatgaatgaggaagtgagacgatggattataatctgcatgatacaacggtattaggcggcgatattttttctcctgaggaacgggatatttgggtgctgtacatgaaagtgatgacctcggcgggactcggcgatgtgtcggagtggatgaagcttgatatgagcatgccgcaaatgaaggtgctgatgcttctgaacaaccacgggacgcttaaggtgagtgacatagcggagaaaatgggcgcttctctttcaaatacgacggggctccttgaccgtttagaaaaatcatgtttcattacacgcgctccgtcagaagaagaccgccgttcagtcgtcgttcaattaacggaaaacgcgaaagatattttccgcagcctttatcaaaaaggacatgtaaaattgaagcgttcattggaaacgctgaccgctgaagaaaaacaaacggtcaatcaaggacttgccatcttggcaagagcccttgattcttccaaacaggcatagagatgaaaaaggcctgccggtatcggcggcctttttttgtttgacatttaattcacttgaagtgaataatatattcgaagtgaattaaaaaaggaaggattgatcagtatgccggatccattgcaaacagaaaaaaaccagagccgggccatcactctttttacgatcggtgtgttcatggcggcgctggacaacggaattatttccgctgctctgacgacgattaacagctcttttgatgtttctccttcatggggatcatggggagtgaccctttacacattgggactcagtgtcagtgtgccgattgtcggcaagctgtcggaccgatacgggcggaaaaaactgtttatgatggaagtcggcctgttcggactcggctctttgcttgtcgcactcagtcagagcttcccgatgtttttggcggcacggctcattcaggcgcttggcggcggcggaatttttataatcgggagttcgcatgtgctggccgtgcttccgaaggagaaacaggggaaagctctcgggcttttaggggcgatgaacggtatggcggccgtcctcggaccgaatatcgggagctttttgcttgatgtaaccggatcgtggcattggctgttcttgattaacctgccgattgccgccgctttggttgtgtgcggcggtttgtttatcgctgaaacgaaagagcctgaggcgaaacggcttgatctcgccggcacaatgctgctgtctcttgcgatcttatcttgtatgatcggtatcacgaatctcgatgggacgaagctgtcagaaagcataatggacgtaaaggtgtatgggtatcttttgggagcggcacttctctttctggtgctgcttaaggtcgaaaagcgggttgaataccgcgggggcgatccgattctcgcctactcgctgctgcaaaataaagtgtttcaatggacgcttgtcatcggatttttatcgggagggctgctcgctgcggtcatttttattccttcttatgcggagcaatatttacacgtatcggcggagaaagcgggttattggatgacgccgcttgcgttggcgtcaggcatcggagcgtggctcggcggggcggtcacggataaaaaaggaccggtcttctccgcggttgtatcaggcgccatcgcctttgcgggcttcagcctgtttccgttatgggtgacggataaatgggaatttgtcacggcgagtgtcattgcggggatcggtttcggatttctgctcggggctccgctgaatgtgcttgtatcagaaacggcgggccaaaacaaaggaacagcgctcggcacgctgtcactcgtaagacaggtcgggctgacgctcgctccggctttatatgccggcttcattacagcgggctttgaccggatcggagaggacattaaaaaccgtttaacgaaaagcggcattcccgctgatcaggcgcaaacgcccgatatcggcggcggactttcttcgttgcaggagcaggtaagccgaatccccgttcccgccgtcaaaaaagcggtttctgatgcgattgaagcgggcatttccagcggctaccaccatctttatacggcagccgccgtcatttcattatgcacgattgtgtctgcggctgttttggcgtttttccggaagccggcatcctctaagacagatgccagcccatccgccgggaaagctcagtaatatgggcgatgtgatgttcagagtgccagacatatagcccgagcgcctgttccagcgtaaccgtctctttagatacaggatggaagtatgtccgtttgaattgggcttccgtcatggagcgcaaaagagcggcccatcttctgtgcaggatcgttaacagctcaagcgcatccccgcaagcggcggttttggaatcatgaagagcggcccagcctttttcatcataggacggatttccggttcattctccgttaagctcaatttaaaccgggtatagccgttcatgtggctgtccgccagatggtgaaccacttggcggacagtccatccccttcgcggtacggcgtatcaagctgactggccgacatcgctctgacagcttggttcagtttagccggagcgtgttccagcgcattgatccattcttgtttctgtccggccgaaatcgattcagccggctgatactctccaatcggatggctgagggtttgtttttccatttttgtctctctcccgctgctcgtattatgaaagtatgatggtgatgtcgcagccttccgctttcgcttcacgaaagacctcaagcacactctcggcgccattttctgtaagctgcttgctttgttcaaactgtctccattctaaaacaagggggtactccacccatccggtcagacagtcccataaagcgtcaaggttttcaccgtagtactcaggaagggcaagttcctttttcaatgtctggtgcaggtcgctcatacttctgatttgctccccgttaataactgctttattcatgcgcggctcctttctcatgattctattctatcagtttaccattttcctcttcagaagtgaccggagtctgccgcggttccagctggacgatgccttgcccgccgtcaacggccaccctgtccccgttttcagttttgacgttgcatttccgcacccgacaacggcaggaatccccagttcccgggcgacgatcgccgcgtgggacaaaggggcgccgacgtccgttatgatggcagccgctcttggaaaaagcggggtccagcctacattggttgtcgacgtcactaaaatttcccccgccgcaaaagaatcaccgtcttccggagcatcaaggacacggacaatgccctccactctcccggccgctcccgcgaaaccttttaaagtatgcgcatcatccgtttccgcaggcataaaagcatcgtaataatccgctcttctgtcaggatcctcagcccatttaaacggattgaatcttccgttaataacggatggaaacggcggcagttttttataggtttcatagttttgctttctcgcttgaatcgacgcaaccgccggctctttccccgcgagcagatcggttatttcatgcagatacaggaagaaaatatcgtccttcatgccggtcatttccgccgctctgagcgcgaatgctctggctgtccggtacactctgacaaattcggatctggttgtttctctaatattcgcgtattctgacgctttttccattttggctttgagccatttgaccttatgaggaaactttttttcaaatcttcggaaggcctgttcatgcgcccgctgctgtttcaaaagcagttgttcggcatcaatacccgactccttgtgttctttgatctgcttcgtcagccaatcccggttttctcccggatgcggtatggaaagttcgtattcatgcgggccacggtggccctggttcctgagatattcttcctcgctcatacggcctttcatgacttgatcaatgccgataatcggctccaggctggccagtccgccttttcccctcagattggaaagcaggagattcgcatcttctatgcctgcgagttttgttaattgagaggttaacgacgaagaggattgcgcagaatcacgcccgccggatattaacgcaaaccacgcgttgcataaatacggatagatctcatcgttccatatcgctaataatgcctgctccgtttcggcgcgtttcagcttttcctcaatattccggcaccactccggtgattcgtccaagtaggaggacatgttttttttcgcttgcttcattttcgacagatacggtttcagttttttcgggatgatcttcaataattcatactttgagaacggatataaaggtatcttcatttccgccgggatttctcccaatgtatcgctcatcatttttccaatttttccgcctttcggattcagaccgaaagcggcgagaacggaaagaggctggctcatattgttataggctctgccgcaaatattgccggaccagacataatagcccggaatgatgcccgactcttcatccagattccggaggagcgaccatgtcagcggcgtcatcacatcgggaatcgcttctcctatatttgtgtttgtccataaaaaatcaccgctgaaagaatcgttccattcataggtttccagatttccggcttgtaaggtcgtaatcgggcgggattgaagaatatacaatgtcccgcccgcggcggcccattcaatatcctgcggccctccaagatctttttccagctttttcgccagtttatagagctttgacgcatatttgcgaaattccccggggccgtcatattttttcttgggccgtgccagtttaaaagaataggcatcggcttccccggaaacgagctgctccccgagaccgtagacgtaattgcctgtcatctcccgcctgctccccgtaatcggatctgcggtaaacagcactccggatatctcagacggtatcatcagctggatgacgattgcgatttcatgctcatcttccattccctgaacggcgctgtacgcttttactctttctgactgtaccgaccggcggacttcatcaatcgccctggacatgtcttgatctgttctgacattcaacaccgtatcgaattctccggcaaaggaagcctgagcggaatcctcgctcagcgcggatgagcgtacggcaaacaacgcagatgcatggcggctgcggatggaattcacatattgatcaacagcctctctcgcctgatggcggagctgtccgtcctgaaaggctgacggcaaaatcacaaacccttcaggcacaggatacccgctttgatacattttagagagaatgcttccttttcctcccgcaaaggaataaagttcggccggaagttctccgaatgttttgacacagtcattcataatgtccccgctcctttttagtcgttcatccaagctcacagtttttctctttttcactttttttgaaagtatttcctataagtatacaatatatcggtcttcacaagggagaaaatcggtggcgttattttgtcataaatgcatccgtcaaaacagccgcaggcgggggctttgtatgcaggatgtacaactatccgtcctcgtgccggataaagcggacccgtatcaaaaaggcggccgaagcgccgcctttttttcagactgtgcggccttgatgcgccgccgtatttcttttggtctgcttcggctgatacactttcccgacaaacaggtatccgtatctgaaatggttgcacccccacgatacgaaaatgggacctagcgtgcagatcaaaaataaaagaaggatggcagccgctaaaggcattgaccgcaaatagccttccagaagatatccgctgattaaaaagtaggagtgcagcagatagattgaaaacgaatagttgctgatcatcatcacaatcgcgggcacttttttgagctttgaaaacagatgaaaacacagaaagatcatactgaccgcgtaaatcataatatccggacgcttagaggaaatggagccgccgctgatatatgaaacggccacaatcaatattgccgatacggccgcactgaagtaaaccgcataacggtactgattgatgagcgataaaaaacgcggatattcctttccgcaataaaatgccagacagaaataaaacacccagcccggaaacggaacccaaaagaacggaaaaatagaatcaagccccgatgatgccggcggatgaaagatggaaaagtaagccagatagacggcgttgatgataaacgaaacagacagcacccacacgggggatgtgttgttcagccagcggtgcagcagcatatggagaatgtaaaattgaaagatcacaagaatgaagtagccgatgaagtttcctaaaaacacattttctaaaaatttaccgatcactgaaacgaatccggctccttcttccgccacgcttttcattaaaatggcatccaccgcggcaataaacagaaacggcacgaaaatgactttgccccttttctttaaaaaacccgctggaacgcctttcgggtatgacctggcaagcagaaattccgaaataaagataaacgccggcgtgctgaacatcaagagggtccgaaacgcatcaaccgtatgggcggcactggctaaggactcttcctgaatcatcagcaccattgaaactgcgtgaagcagaacgacacttaaacaggacaggcagcgaatcacgaaaatttcttttatctgcatgcggccgctcctttttcacaagcgcgccggactttggcgtatgcttggcgcagccatttttcccgcagttcgggtgtgctcgttctgacgacagaaaaaaggttccgctcggctttttgaatgccgcaaaattgcagaatgctttttttcagcgtaatccagtccgagtttttccggaaccactttaagtaccagcccggggagtccgccgtataaaagacctgtgccgtctctgcccggagcagtccttttacgcggccgttttcatatgtgtaggcttctccggcgacaagcactctgtcaaaaaagcctttcataatcgccggaacgcctccccaccacagcgggtagatgaaaatgagatgatccgcttctttcatcagtttccggtatttcttcgtttcagcgtcccggttcatgtcagagcgctttttttcgccgccgtacttcagcacgggatcaaattgatcggcgtataagtcaatgaccgtatagctttggccgctgtcctttaaagccatggcgacgtattttacgagagccgcattgaaactgttctcatccgggtttgcatacacaatcaccgtcttcatatgtccctcccagtatttattaatttttacaatgattatatcatgatgtcatatgaatgaggcaaagacacgagaaaggctttttccagttctgctgccgtttcgataacccctttctgcatatttttgctgattttggcgccgcggattcaatgataagcatccggtgcttctgcgtttttgagcggccgtatggtatactagctgtcaaatgaatgggcttggaggacaacatgagaattttaaagtacgcgattttagggcttttgcgaaaaggcgaattgagcggatatgatatatcgagctattttaaggaagagctcggccagttttggagcgcaaagcacagccagatttatccggaattaaaaaaactgacggctgagggatttattacgtttcgcactgcgattcaaggaacgaagcttgagaaaaaaatgtacacgctgactgacaagggagagctggagcttgctgcctggctgacgaaaaaagacccgattccggaaacggtgaaggatgaatttatgctgaaggcttatttcatctcagctttgacgcaggaagaagcggatgagctattcaccgatcagctcgtaaagcggcaggagaaattgtccgatctggaaaacagttatcaagaactgatgacatcgtccgcggaggcggattcattttcttctcctgatttcggccattatctcgtgctgacaaaagcgcttgagcgggaacggaattatatttcctggcttgaagatattttggctctcatcaaaaaagcataaacaaaacggggcggctctgtatctgcaggccgcctgtttacgttctgaggaccgcattgataaacgaatcagccattaaaataagaaaaagcagactgaaataaacaatcgaataaaaaaacatccccttcgaccattgcgtgtcatccgccgcctgaaagcctttgacgctccggtacagccagatggccccgagcaggagagcggacgcggtataaaacgggctgacgtctatataaagaggaacgagcagcgaaaccgcagtcaaaacggcgatatagcgcagcatttttatttttgtgacgcgattgccttttatgatcggcaaaagcggaatgccggcggcacgatactcttcctttcgcctgattccgatcgcccagaaatgcggcggctgccacaaaaacataatcgcgtataacaaaatcgcgggcatatcaatgtacccggccagcgcgcaataaccgattaaaggcggagccgcccccggaaagctgccgacaaatgtgctccagacggattgtcttttaaaccaaagcgtataaacgacggcatacagcaaaaatgcaagcaggccaagaacggcggtcagtacattaagcgaagcaagcatgatgaatccgcatacgccgagacatgtgccgtacaggaccatgaccgtcggcggtattcttcccgtgacgctggcgcgggtgcgggttcgctccatctttgcgtccatgccgcggtcaaagaagttattaaaaacagtgcttgacgccatgactaacgccgtgccgatcatggcagccgccatggcggcaaatataccgggccctccgtccgtcctttccgactgaagccacgcgatccaaaatccgcctaatgcggcgagtgaatttgagatgataatccccggtttggcaagaatgataaagtccttgaacgtcatccggtttccgttatgcttcatagactgttccgtctgtgctgcatttgaattcatttgtggaggttctcctttttcggcttatcatatcaggaagaatcaggaagtacaatttattttgggcatttttcacacaattgtaaattgtatatgaaaagccgcatcttgtgaccggatgcggctcttccctttttctattcaaagtctgcccatacagctccctgatccgccgaacggacacccattttcaatccagcggatgccctgagttcgggccggcgatggcgggctccacgcgtcatgtttgcgcctcactgagatgttcgctctcttcagtcacacaaaagccgggtgtatattgcaaatcgacgttcttctttcccgagcctttagaaaaataaaaacccttgccggttagacggcaagggttgtttcttacagtgtaaatgcgatatccgccctgatacagggtctttgacgaatacgccctcttctctttcttcgatctcaaagccggcatcggtcagcgcttttgtcacacgtgacagctctttttgatgcggcagcgtgatggtgtaataatccagcccgcttgcatttcccggtttcggcggcgcatgttttccggcccatatattcagaccgatgtgatggtgataccctcccgccgaaacaaacagagcggacatgcccgcgtaattgccgacaatgtcaaaaccgaggatatcggtgtaaaacgctttggcttcctgtaaatccgtcacatgaagatggatgtggccgataacggttccttccgggagacggcttttccgttcagctccggcttcttccaaaagcccgtccacatcgacgggcgccgtttgcatgacgtaattgccctctgcatcccggcgccacgtgctgcggggacgatcggcgtatatttcaatgccgttgccgtccggatcagacaagtaaagagcctcactgactgcgtgatccccctgcccgagcgcgatgccgttttcaatcagcctggccaatgcgatgccgagttctttccggtcaggcagaagtatcgcgaaatggtaaaggccggtgacagaccgctccgggagaacgacggcgctcggattttcttcaagcaccagcaggacgcgttttccgtctgctgacagttctgcagaacgatctgtctgcgagatgacttgaaggccgatgacattccgataaaagccgagcgagcgttccatatttttaatcgtcaatttgacataaccgattgctgtatcttgatgaatgccggtcatttgaacgccttctttcttatgctgaaaaagtttctcccttttttgatttgaaaaggagctgatccaatgaaagcagacggcttcctgaaagcgctaagtgaattgacgcaaccagtaagatgaaatcaaattccgatccgcccataaatggtgaggaaagcttcgccgtgaagatggcgccgactaatgtgacggcaaacagaacgccgataatgcgcgtcgccaaaccgaaaaagatcagtaccccgccgacaagctcaatcgtcgcgatgacgtagaccataaaggccggaagcccgatgctctggaaaaattgcgtagttccttccaacccttgaaacttggataaaccgtgaacaaaaaagataatacctgttacaacccttaaaagcagtgttcctgtttcgaatgatttattcataaaatcctccttgaaaattattatcacttactttatgtaagctagtatatatacataacttatttacgtcaagtaattttgttacatttaacgaaaataacttaaaagtactatttgtcttcgcaaaaaaaagacctccgcactctgtcggaggtctttttccctacctatgattcccggaactggctctcatataattcccggtaaaacccgttctggctgagaagttcggcatgggttcctttttcagccatttcgccgtctttcagcacaagaatctgatcggctttttgaatcgtgttcagcctgtgagcgatgatgacgcttgttctgcccgccattaaacggccgagcgcttcttgtattttcacttccgtcaccgtatcaatgttgctcgtcgcttcatccaaaatgagcagcaccggatccgccagcacatctctcgcgatggaaataagctgtttttgtccttggctgatgcccgcgccgttttgggtaaggacggtatcgtagcctttcgggagccgttcgatgaatccgtgggcattggcggcttttgcggctgcctccacctcttgatcagatgcatccagacggccgtaacggatattttccctgatggtgccctgaaagagaaaggaatcctgcaggacaaaccccatgttttttctcagactggacctcgtcagttttttgatgtccgttccgtcaatgaggatttttccgttattgggctcgtaaaaacgggcgatcaggctcgtaacggttgttttacccgctccggtcggtccgacgaaggcgattgactgtcctttcggaacgctgaaggacagatgttttaagatcgggctgtcttcctgatagccgaaggagacatctcggaattcaatctctcccgttttgatcggctggtgcgtcgcatgctcttcatcttcccgctcctctttttcatccagcacgtcaaacacccgctcagccccggcgatggccgataacatcgtattgaactggttcgccaaatcatttaaagggcgcgtgaactgccgcgagtattctgcgaatacgacaatggaaccgatcgaaatccaccccttcagcgcaaacagcccgccgaccgccgctataatcgtaaagcttaaattgtttaaagagttcatgactttcggaatgaatcccgaaattgtctgcgcccaaaagcctgatgattgtaacgccgcgtttttttctaaaaattgctccatgacgcggtcttccctcgaataggctttaatgaccttcgctcctgatatcgactcttcaataaaaccgttcagctcgccgaggtttttctgctgctgcttaaacaggagtcccgtccggttggtgatccatttaatgctcaaaagcatgatcggaataatcaaaagcgtgatcaatgttaaaagcgggctcatgaacagcatgacggcgattgtgccgacgaatgtaatgacgctcgacagcacttgaatgacggatgtatttaaagtggagctgacattttcgatatcattggtaacccggctcatcaaatcgccgaggcgctgtttatcaaaaaacggtatcggcagctcatgcagatgggtgaacagctcgctccgcattttaaacacggtgctttgcgagatattgatcatccaatagttttgaaaccataaggacaatgattgcacgaggtaaatcccaaacagtatgaacagtacacccgccaatccgtccgtcgtccgtccgacgataaaatgatcaattgctttcccgatgacgaacggtccgagcaggccgaatatggcgcttatgactaccatgatgatcacaagggttaaaagcccttttttctcggctacatacgaccagattctgcgcagcgtgccttttgtatcttttgctttcgcgcgttttctgccgccttcatttgatttgagcggtattttcggatatcggaaaggtttacgaatgtctttctccactgtcagctccctcctttccgaattgtgattcataaatctgccggtacagatgagactgtgccatcagctctttgtgcgtgccttttgccagcaattcgccgtcttcaagcaataagatggtgtcagccttcatcgcggtggttattttctgcgtaataatcagtgtcgtgcattcataggatctgatcgcttgtaaaagcttcgcttccgtttgaagatcgagcgcgctcgtactgtcatctaacagcaggagggacggctttctgataaaagcgcgcgcgatggaaatccgctgcttctgcccgcctgacaaattgacgccccgctgtcccagcaccgtgtcgtacccgtttgacagcttcataatcgtgtcatggatttgcgcgtctttggccgcttccattacttcatctagtgaagcttcctcccgtccccaggcgatattttcacggattgtgcccgaaaacagaagcacttcctgcggcacatagccgatttccctgcgcagcccgcaagcggagaattcaccgatcggtttgccgtctatgaaaatactgcctgaatcagccgtgtacaggcgcggaatcagctgaaaaagcgttgatttccctgaacctgtcgcgcccataatggcaaccgtttctttcgggctggctgaaaaggacacgtgatgcagcgcgtctttttccatgtccggatagcggaaggacacttcgcgaaactcaatcccgcctgcaagcgcccgcgccgggtcgtgccccgttccctcgccgccttctgtttccagcacctcgccgattctttccccggaagccttcgcccgggaaaataccataatgagaaatggcaggacggacagcgcgcctgtaatccgcgtcgcatagttaatgacggaaacgacatcgccgacctgcgctccgccctgagcaatgcttttggcgccgaaccataagataaacaaaatgcagctgttcatcagcagcattaaaatcggcatcgccgcttccacgagacgaaaagcggaaaccgttttttccatcagcttcgtattcgatttcaaaaaacgtttcacttcgtggtttgcacggaggagcgctttaatcagtttgatcgccgtcaggttttcctgcatgatcgtgttgacctgatcaagccgcttttgcacggaccgaaacagcgcgccgcctcttttcagcacccacagcaaaaacaaaagcaaaaccggcaccgtgatcagcagaaaaaaaccgagtttcgcattgacggtcagcgagagaataatgcccccgcaatcattaacggcgccctgagcataaaccggagactcatgaaaagcatattctggacctgcgtcacatcgtttgtcagcctggtgataaacgacgtagatgagaattgcgcaaacgtcgaataagagaaggattgaattttttgaaaaagcccttttcgcgtatcatacgcatagctctggctgatgtgggcggagtagaatgaatttaaaattcccgatgcgaatgaaacagcggtcagtccgatcatcaccccgccccacagccaaaccgtaccgagatcctgctttaaaattccttcgtcaatgattttcccgatcagcaggggctgtatcagctctaccgcaagctcgatgagcatgaaaaacagagcgattcccgccaaaagggaatacggttttacatatgataaagcctttgacatgtgtaagcctccaaatcctttgttcaatattattattttatgcctttccggcaaatgaataaagaaatttggtgtgccgttttttcaataatctgcgaaaaagataaaaccttcccggggaggggaaggttttgaccttattgatccaattgctgttcaatgcgctcccgcatttgcggaacgcctaatccgacaatgacctgaagcgccctgccttttctgacgacgccgtgggctcccagctctctgaaatcggcgtcacttttgacctttgattcatcagcgacagtgacgcggagacgggtggcgcaattggtgacctccgtaatattgtcctttccgcccaacgcttcaatatacaaagcggctgtatcccgctgtgtttcgtctgccgcagccgtttcttttgaagcctgcttccgttctctgtactcctttttcgaatagagctttgtttcctgcccttcctctttttctctgcccggtgtggcgatgttgaatttgagaatgaggaaacggaagacgaaaaagtaaacagcggtaaaacacagcccgatgatgatctggtatacatacgtcaaaccgtggcttgacgccagcgggatccagttcaaggtcgcagcttcgatcaaaccgcctcccatatttccgacgacgcctgccatatacatgacggttgccatggaagcggcaagcaaagcatgaaccgcaaataaaaacggcgagataaaaaggaatgtaaattcaatcggctctgtaatcccgctacaatggacgtcaaggtgaccgggatcaaaaggccggcgacgatttttttcttttcctttgaagccgtggcgtaaaaagcgagcgcgattcccggaatgccgaagattttcgagttgccgtgaagcgcgaagcccccctgcgggaacaattctttcagcggtttgacgctttgagagtattccccgagatgctgggcccaataggtgacgataccgccttcagccacagccggaccgtaaataaacggcgagtaaataaaatgatgcaggccggtcggaattaaaatccgctccaggaatgtgtaaatccacacgccgatcgccccggaagaaacgagaaaactttgcagcgatccgattccggactgaaccatcggccatacgtatgccaccgcaagtgaaatcggtatcataatgaagaaagaaatgataacgatgtaggaagatccttgaaaaatccccagaaaatccggcagttttttatcaaagtaacgattgtgcaaatacacgacaatagatgaaataaagatggcgccgataatattcgtatcaagcgttttgatgccggcgatcatcgtcagcccgctcgttccgccggcttcctgagtcatatcgacatgaaaagccccgccccaaaccgtcagaatcgcattgataaagtaattgaatgtcagataaactgtaagcgcttccaaacaagcccgcgcctgcgcttttttcgctaaggcgacagggatgccgatcgcaaacaggagcggcatttgattaaagacggtccagccgccctgttcaatgacgtaccagcattgataccaaaacccgtcaggatcagccagcggccccatcagcgttttatttttaaacagcgtgctcagaccgacaataataccggaaaatgcaaataataaaacaggcacaaacatcgcgctgccgaagcgctggactttttgcatcatttcacgtgacctcccgctatttatcaaaattttcgagctctttataatcaacatatgcacggaataacgcttcgcccaccagaaaaaacggggcaaatgcgacgatttccgttttatcgcttaacgtcaccggcttgctggtcgcataaagattatacggcgtcgtttgcgccagtacgttgtttttcagattggtgattgaaataaacggaactccctttgcggacagggtccttacctgcggaattaattcgggtgtttcgcctgataaagaaataatgatgaatacgtcatcaaccttaaaatcatcacacatgatattaaactctgtgatgtcctgaattaaaatcagatacttccgccgggatacaaacatccgctgcagctcacgggcgcacaccctctgagccgtccccgatccgtaaacgaaaatccgttttgcttcatctatcagccggcacatctccgtcatatcttttgacttcacgtattttacattggcttcaatatcatccagcagcttttcaaacgtcatattctcgccctcttcaggctgatcctcccatttcagaaaaacacggaattcactatagccgctgaagcccagtttttgggcgagccgcaggatggaagaccgagagacattacaggctttcgccatgtcattgataccgagatggtagcacgtatgtttatgattcaatatatattttaaaatataaaaatcgttgtcatttaatttcgcgtaatgctgattaaccagttcttcaagactcatcccaaaaatccccccgttttctttctattatatagaataacagataaagaaaacggggaagattgtcatcaggaaataggagacgggcttacatcaagctcaggccagtagtccttattagcctccatcagatcttcaagaatcagtcttgccacacgggcattcggcactgtttttgacaggatcagcgcctgccacagcttttgaaatgaccgctcttcccacgcttcagccgtcagtttttcgacagacacctgctgttccatcaggcctttttgaaattgcggtatgttcccgactgagagcggttccggtccgtttgaacctacgagacaaggaatctcaaccatggctgacggatcaaagtttgcgatcgcaccgttattttcaacgattaacagcattctctccccggtgttataagcgatggcccgggcaagatcgacgatataggaagcatgatcatcaattttaatttcactgttctccgatgattgttcgcgcgtaatcatatcgcattggctgaaaatgaaagcttcgcgcccttccatgacttcgttggctctcgtatggttcggatttgattttttcaccatatcatccgggaataagtaatattgcagatatgtgttcggaagcgtatccggatcagccgcctgtacgtcgcgcgcttttttgaaggtgtcattccagcttgcttcagtctgttcggcctccgtcttcggaacgtagccgtattcacggacatgctctttcagcttcggcattaaatcattgccttctcgatccgtgatggacgtccaccagccaaagtggttcaagccgtagtaacggacgttcatttcttttcgtgaagataatccgaggatgttcgccatgcgatcctcaattccgaccggcatgtcgcagatgttcaatatttttgaattcggtctgaggcgccgtgtagcttcggccacaatcgccgccggattggagtaattcagcatccatgcgtcaggcgagtacgtttccatataatcaagaatctccagaacaccgccgatagagcgcatgccgtatgcgattccgcccggcccgcatgtttcctggccgaccacgccgtacttcagcggaatttgttcatcgagcgcgcgcatcgcatattttccgacgcggatatgcgccatgacgaagtcaacatccgtaaaagccgtctctgggtcatcagtcgccaaaaattcaatgtccggcgctttttcttttatgaatacctcacacgcacccgcaatccgctcctgcctttctttatcattgtcataaagtttcagctttctgatcggaaactcttccaggtgattcaaaagcattaatacaattccgggggtaaatgtgctgccgccgcctgcaataacgattgagaatgatttgtctgtcatgtgaagccctcctctgataacgtttacattttatttatatcatgagaaggtccgatctgtaccgggtttgaaggagttagatcatttgatcatttttagttatttttctcaaaaagcgggaaagttcccacaggtacgaaaaaggcctgctgtcatcagcagaccccttctcaaaaatgctcttgtaaatcagaaagcagcacttcctgctcaaattgtggatttccgatcggaaaaatcctggctgtttccttgtcttcgttgacatgctgaatataaatcgggactccttcatacgtcacatacgccatggcggcggattccgaaatgtctttcgcacgctgtgtattcacgtctcaaacctcctttagtcctcacacataacgtgtccggcacccaagagaagtatgcttgtttcttacaattgtccggcggtgagtttgaattttttgaggcgtttgtaaaacgtgctccgcgggattccggccattttagcagccagcgtgacattccccttcgctgattcaagcgcgtttacgatgatgtttttctgaatgtgctcccggatggagacagaggacgcttcttcctgttcataagactcggccgcttctttaagacctgacgcttcaagcagggctgcgatggggcgccctgacagccgtccgtccgggaacatgacggaaagacgttcaaatacattaaacaattccctgatgttccccggccatttccggctctttaatacgtctaaaaagtcaacaggaagctcccccgccagccgcgatttcgctgaaattcaaggaagagtccgggaatgtcttcggtgcgttctcttaatggagggaggtggatcggacagacgtgaagccggtaaaataaatcttctctcagctttttgcattcgacaagctgtctcagatcagtgtgggtggcagtgatgattctgatgtcaacgggaatctcttttgtcccgccgaccggggtgactttccgctcctgcagcacccgtaacagagccacctgcatggagtgtgatatttctccgatttcatcgaggaaaagcgtgcctttatcggctttttgcaaagcgccgctatgtcctttccgtttggccccggtgaaggcgccttccgagtagccgaacagttcgctttcaatcagcttttcggggaccgctccgcagttgacagcgataaacgggccgtttttcctggagctgttgttatgaatcgcccgggcggcaacctcctttcccgtcccggtttctcccgtaagacaaacggttgcgtccgttcgggcgacaagctccagctgctcaagcatatgtcgggatgacgggcttttgcctgccgcaccatgaaatataaacgacggcttttcttcccgtttggataagtaaacgcatgtgaagccgttctcctcccgcttcgtccgcttgatatgatagccctgttcctcaagctcgcgcagcatatgtccggtaaaatgctgaacgggacggcttgcggcgataacccggctcatttcattgcaaagcacgatcggatcatgagaccgggtaagcccggcgaatttgctgatcatgtcaagttctgtcattttgatctttagggcaagctcccgttccgccgtataagcgatggaggaggcaattccgagcataaaaggctgagcgcgggcggcggggcaggaaatatcaatgacacccgccagccgcccgtcttcataacggatgggcgcggcggaacagctccattgatgagaagcgagcgaataatgttcagagccgtgtatcatgaccggttcatttgtataaagagccgtcccgatcgcattcgtgccgacggccgtttccgtccagcgggcgccttttaagaaattgatgcggttcgcttcatgaatggtgcgcgggtggccgtcaactgaatggacaacgccgtctgaatcaatcaggagaaccatcatttccatttcccgcatcgctgttttcattctttctgcgtgcggcattgaggccgctaaaaataacgcatgcttttcggcctgcctttctaaatgatctgccggcattacattcggtcccttttctagataagggttgacgtcggcttttttgcagcggtgccatgaggcggccacccgcttctgaatacgggattcatcgagcacgccttctttcacaaagcgcttccaggttttaaaatcattccgaatgacattcattgtattcgctccccctgttcagaccatcttttcatatattgtaggggaaaagtaaagcgctttcaacgaaaaataccccttctcatctgagaaagggtattccggttatacggaatgcaccgcaagtccggtgacattcagcagggcttcctgaagcgtttctgacagagtcggatgcgccgcgataaagtgctccgacatatccgccgtcatttcaccgttcatcatcatgaccgcctgaccgatcaattccgtcacgtccggtccgatcattgacaccccgacgatttctccgaattccggctcggcaatgattttcattttgccgccgtgctgatgcttaattaacgcttttccgttagcagaaaatgagcattctccgattttcacatctccgtatgtctctctcgcctgtgtttccgtcagcccgacagctgccatttccggcgatgtataaatacagcggggcaccgcccgcatattgactttgctatcctttcccgaggcatgcgcggcggctgtgattccttcatgaatggcggcatgcgcgagctgcattcctccggccgcgtcgccgcacgcatatatatgaggcacattggtctgcatatggtcattgacttcaatcccgcgcggagaataccggatgccggcttgatccaaattcagcccttgcaaacgcggttttctgccgattgcaaccaaaatgtgatcagcctgagcttcaatttcttttccgtcttttgtccacacggcggttttcctttctttgtcaatccgctgaagggcggcttttgtctgaatatcagccccgctgtctcttaaagagtcttcgaaaacggcggcgatttccctgtcttctgccgggagcagccggtcagccgattcaatcaccgtcactttcgttttaaaccggctgaataaagaggcaaattcgcagccgatcacacctcccccgacaatgagcagagacgaagggattttctgtaaagaaagcgcatctttgctgtcgattacccaatcgccgtcaaatggggcaaacggcagctccgccggttcagatccggatgcaatcaatatccggtccgcttccagaatgtcttttgcgcctccttcttcttcaacaagcaatgtctgctctgtgagaaatgaggctgtcccgctgatgactttaatctgatttgctttcattaagtattgaattccctgcacgagctggctgacgatttgccgtttgcgcccctgcatgcggttccaattgagtgtaatgttttgcggcagttcgatgccgaatgtatttgcatgcctgattttatcgagcacattcgcactttccaaaagcgactttgtcgggatgcacccctcattgagacaagtgcctccgagcggccctttgtcgatcagaacgacttctgctcctctccgcgcggcagtcacggcagctgcatatccggccggcccgccgccgataatggctagtttcattttttcacctctctctataaaatcaaaccggcaggctcttcaagcagcgctttgaccgttttcaggaagtccgcagccggggcgccgtcacatactctgtgatcaaaggtaagactcagcggcagcatgatgcttttgacaagctcatctcctttaaacgccggcgtttcatagcttgcgcccactccgagaataccggcttcaggcggattaagaatcggggtgaaatgctcaattccgtaacccccgagatttgtaatagaaaatgtcgaaccgtggagatcatctccggaagcattgccttcccgcgcccggcgtgccgatgtgctgatgtgatccgcaagctcaaggaatgaaagcttttccgcatcccggatcaccggcacgacgagaccgttttcaagagaaaccgccatcccgaggtggacatatggataggtgatgatccgctcctcttgataagagctgttcagctcaggatgctgtttcagcgcaagcaccgcggcccgggatatgaaatgtgtgaccgtcagtttaacaccgctccgctttttcgcgctgtcggcgagctgctgctgccattttacaagctccgtaatgtccgctttcatcgtcagcgtcagctgggcgctgttttgcaggcttttgtgcattcggtctgcaatcacttttctcatcgctgaagccggttttccctccggctgtgctgtctgaaccgaagactgcggttcagcttctgtcttcatcgccttgatgacgtcagcttttacgattctgcctccgggccccgtcccgttcagcgtatcgactttcaacccggctttctccgccatttttctggcaacgggagatattttcacgcggtgtttgcgcttttgcccggcttttggagcgggaatatgttcaggttcagcttgcggtttccctgctttttcaggagccggcgcctccttctcccgcacttcttcgccgttttccccgatataacagatgggcgttcccggcgggactccttctccctctttgactttaatgtgaagaagcgtgccgctttcaggcgcttctatttccatttctattttttccgagttgatgctggcgatgctttctcccttttctaccgggtcgccgacttttttattccagacggatacttcacctttcttcatcgccattcccagcttcggcattactacttttacagccattctgtatccctcctttaattcattgccggctcgccaagcaattcaagcgtgacgctgacaatttggtctggtgtcggcaaatattgatcttcaagcaccggcgaaaacggcaccggtgtatgcggcgctgtaatccgcttaatcggtgcatcaagcaaatcaaagcccttatcggcgacaatcgcagcaatatccgtggcgatgctgcagcgcggattggcttcgtcaatgatgatcagccggtttgttttttctaacgatgtgaaaatcgcttcctcatctagaggagacagactccgggggtcaagcacctcggcgtcgatgcctttctcagaaagctgtgcagccgcttcaagcgcggtattaacctgcttgccgaccgcaaacagcgtgatgtcgctgccttcgcgtttgatatccgcttttccgagcggaattgtataataatcttccggcacctcgcccttcatgctgtaggacgttttgtcttcaaaaaagaataccggatcattgtcttctattgccgccagcagcaaacctttggcgtcatacggattggacggcacaaccgtcttcagccccgggatgctggtgaacaggccatacagcgcctgcgaatgctgagcggctgcccggaacccggctccgtatgtggtgcggacggtgatcggcacttgcgctttaccgccgaacatatagcggaatttcgccccttggttaatcacttggtcaaagcacgttccgataaaatcattaaacatcagctcggcaatcggtctcagccccgtggatgccgcagccatggccgcacccatatagcccgcctcagaaatcggtgtatccagcactcggctgcgcccgaattcctgtacgagaccctttgtgaccccgagtaccccgccccatgcctcatcatcttgcaaatgatcgaccgccgctcccccggcgacatcctcaccgattacaagcacattgtcgtctcttctcatcgcaagcttcattgcttcattgatcgcgtccgacatgcttatgactctcgccatctcacattccccctttttcatatgacacgtagacgtctgtcaacagctcagactctttcggataaggactcttttcgctgaacgagacggctttttcaatcgattcgctgactcgctgttcaatgtctgacaatttatttgcatctgtttcttttagaagatagtttttaaagccttggatagcatccttttcttcaagatgctcagtcttttcatcctttgttttataagtttgggcatcgccttcgaaatggccgtagtttctgtaagtcatacattcaatcaaagacgggcctccgccgtttcttgctctttctatcgcttccccggctgcctgataaaccgctaaaatatcttttccgtccaccgtgacccccggcatgttgtaggcagccgcccgatcggcgattgaatcacaggctgacgcgtactcaaatgtcgtggcttcgccgtagccgttgttttcggcgatgaacacgacaggaaggttccatactgccgctaagttcagcccttcatggaaggtgccttggttattggctccgtccccgaaaaagcaaacgcttacatttttagtttgtttatatttagccgtgagcgctgatccgcatgcgagcgtaaatccgcccccgacgattccatttgcgcctaacatgcctttatcaagatccgcaatgtgcatagaaccgcctttgcctttacacagtccggtcgcttttccgaatatttccgccatcatgccgtccagatcacagcctttggcgatacaatggccatgtccctgtgtgtgcttgtaatgctgtcgccatcatctaaatgagcgcacacccccgcagctaccgcttcttcaccggcatacaaatggacgaatccgggaagcactccttgcgcgaaaagttcatgcactttgtcttcaaagcccctgatttccagcatcttttggtacatccacagcgctttttcctcagttaatgacaagccttctcgttttaacaattccattttgtgcgcctccttctatttagggttcacacttataaatgcaagaagcatgccagcctttgaagcccgtaaaatgaatgtttttattttttcaatggagacagtttgagacaggtgtctcattttgtctcgatccgttccctttgtctcgttttatggcatacaaaaaagaccgggcatcaccctgtctttgacaatgatcgacgtatttatttcctcggaaatcttttattgcttcattcttccgcatacagtctatcacggcgtttgagtggttacactctttttttcatatccacgcgctgcagttcatccttttcttcaacagcccgattcagtgcttgaagcatgtaaccaatgcctttatacgatgacagaggccaggtgatatgctgatgctctccgatgacggcgtttagaatgcttcggtattttttcccgccaagcatgacaagctcttcgacgtcggaaaagcctttttcataaaattgacggcgcagctcgtccgctgccatgatctccgggtgaccggttccaaaagtgacatcgtaatttccgggaacagtatcatccggacgaagaaatccgtgcttcgccgacaaaatcacccactcatcgaaaaatgctttcgcatatcgctcgcatgcctgatgaaacgggctgagataagcgtcttccgcccttaccggccctgtatctgaatggacatcccaaatttttttcttgccgcaggggatgatgcacagtcgtttcatttttctctcccctttatgatgtatctcctatcaatgtaccattattcgtttatttctgcatgacgaaaccggccatggatctgtctgggtaaaagctgcacacaaaaaggcccggaattcaaaccgaaatccgggccggatgatgagttgtttatgtcactcttgctccatcccatcaagatactttctctcaaagtcatcgagcaatgcacgcacttcatctgttgactttgtattcatgcattgatttcttaattcacttgctccccggaacccgcggagatatatcttgaaaaagcgggggagcggtttatatgctctggcttctgcttttgaatattcatcatgaagatccagatgcaatctcaaaagatcaagcaattccttactgctatgctctctcggctccttttcaaaggcgaacggattagtaaaaatgcctcgtccaatcataatcccgtcaacaccgtattgttcagcaagtttcaagccggtttcacggtcaggaatatccccattgatcgtcaaaagggtatccggcgcaatctcgtcacgaagtttcttgatttccgggatcaactcccaatgcgcatctactttactcatttccgctcttgtacgcagatgaatggaaagattcgcaatgtcttgtttcagtatgtgtgtcagccagccgcgccattcgtcaacatccgtgtagccaagtctcgtcttcacacttaccggcagacctcctgctttcgccgcctgtattaattcggctgcaacttcaggacggcaaatcaggccgcttccctttccattccccgccacattaggtacaggacagcccatattgatatccaggcccttaaaccctaattccgccattccaatactcatttggcgaaagttttcaggcttatctccccatatgtgggcaaccatcggctgttcatcctccgtgaaagtcaaacggccgcgcacactatccttcccatccgggtgacaatagctttctgagtttgtaaactctgtgaaaaacacatcaggtctgcctgcttcactcacaacatggcgaaaaacgacatccgtcacatcttccattggtgccagtacaaaaaatggccgcggtaattcacgccagaaattatctgtcataacaaatccaaatcctttcatgatgggatacagtgaaacctttatcccaaaattaaaaactgaccatgcttcttttacacttatagcatgtgtcagcacttcttatcaaacgatagtaaattttgaacatttcactttttacacgttaaaagtaaaaaagcaaactggagtagaacacattaattgagctaacgtaatagactaccgctatagtcaaccccatatcgtttatttctgatcaactcagtcaactccttcacctttaaaagggtttgagagagaaaaagtgtgatgattatctacacctaatttttatttatattgtggtttattaagattagcgctgaccttcatctttcttagcggccttacttttgctctttttggataaaaaggattccaacctaaatagaatatcatatgagttctccctattaccataaaacaaatttcaagaaataagttgattaagcaaatggggctggggggtatatctgagtactgaaaagaatgtaaaaagaaaaagccttaacttgccgcttgtgaatcacatggagtaaagaggatggcatgggaaaataaactcgaacttaacagaattcaagaacttcaatctggatcttttcggatttactcatggtctagaaataatcaacgccgcaagtggcttggctctatacagtatatgtactaagggttgatcggcttttaaaccccgtatgttaatatctttatacaatcacctatatatatttgtataaggttacgcttcggtaatcctgatccaaaaccaataaaatagactgctgactaagtgccgcagtcttcattcataagattaattagaaagtgttcatgttctttcatcattaaataaggcatcagaagttattgctttcatttcggatattctttgttatacctttaatgatttgtataacagtgaaaacccccaagaaaacagtgacaatattaaaccatggattatcatagaatgaaagatatgtttgaaagaaatccagttcagctatatttgctgggaatccattcatttctctataattaggaccccatcccgttaattctacaaagttaaaataaagctgtgatactaaaaatgccaacaacgtgtgaaaccaacttcttttatatactttacccatttctttatccatttccttttctgcaatactttttagcctagtgtcaatctaacatcattatatgatgaagcatgattgtcgcaataattacttattaaggatataaccatcgcaggtattactgtaatagttgttatcacttgcgtttccgccttatatttattcctttttttagaacaagaggaatagttggggtccttttcctgtttaggctttcatattatatataacgaccaaacatgcttttttagtgtatttgatcttttatcgacagttgttgatatgccaactgccgctgtgatttagtgaaagttagcacccttgccttttacagcttctacttcagaaccttcgttcagttgttgaaatctcaatatctctcgttcggtttcacctcctttttatcatttattaaagacctacttactttggcatgataaatactttacagttgaataatgttacaacttcatctcaaaccaatgatatcaaattattttacattatcccattaatgtcacaataaaccacagcgtcattatacaaacgaggtcaaaattggctgttttctcctcgcttttccacacgttttttcaactcttttcatcagtttaaattaaagatctccgagaaaagaaggaagataaacagccagggcaaaggctgcgcataaaaaaaaccggaaatcggaaatgtttataccgaaatccaggtctgattacgaattgtttattttagttagacgatttcaacacaagcttcgccacagcttccacatgggccgtctgcggaaacatatcaacaggctgaatatattcgacgcgatagtctttcgacagcgcctgcaagtctttcgccagtgtggaaggattgcaggatacgtagacgaagcgtttcggttttacttttttgatggtatctaaaaatgttctgtcacagcccgttcgcggcgggtcgacgatgaccacgtcgggacggaagccttctttcgtccatttcgggagccagtgttcggctgttcccgtgacatatgccgcgtttttgatgccgtgttttttggcgtttttcttcgcatcatcaattgattctttaatgacgtccatgccgcggatctcttttgcgccgcttgaaacccacatgccgatcgtaccgacgccgcaatacgcgtctacgactttttcttttcctgtcagctgagccgcttgtttcacttcgtcatatagcttgaccgtctgctcagggttgagctggaagaaggcgcgggcgctcagttcaaatgacacgtcaccgagcacttcttgaatggcatgtcttcctgccagcgcttttgttttgtcaccgaaaatgacggatgtgcgcgcgccattgacgttttgaataatcgatttcacttccggcagccggttctgaatggctttgacgatctcgtctttattcggcagtgtctctttcgcggtgacaagcacgacctgcacttcgcctgtttcaaaaccgactctcgtcacgatggtgcggacatcgccttttttggtccgttcgttataaacggatacgttgtgtttttccaaaatacggcggacgatacccgttgttttgtttgtcgccggatgctggacaatgcattccttaatcgggacgattttatgggaatcaagtccgtataagccggcaatgatgctgccgctttgcgagcgtccgacttggaactggcttttgttccggtaattccaagggttgtccattccgatcgtatctttaatgttcatttcttcgacattgaatctcgtatgacgttccagagactgaatgacgatgtcgcgtttttcgcgaagctgctgggtgtatgccagatgctgaagctgacagccgccgcactggtcgtagaccgggcatggcggcgtgacgcggtgttcagacggcttgcggatgtttttgacgcgtgcttctgaaaatttcggctgcacatttgtcgcttcggcaacgacttcttccccgggcagagcgccgggaacgaagacaacttttttcttaaaatagccgacgccctctccgttaatgccgagacgtttgatggtcagcggaaatgtctgcccgattttcaattcggcaggcgcctttttttgatgttgattcacgtttttttctctccgtttctatataaagcctttctcctgggaaagcggctgatttgaaatatcacatcttttcagtataacatgcagccggcggttccttcatgtttttcactggaagtttccaaaaaatgatcaaagcggtttttcattcaatacttctccacaaatataaggacgcatagcttaaatacggcgcccattcgctgcttacctgaagcatcacgtctttcgacggtttatcctcaagggcgaagcggcgtttgatggcattttgcaggccgatatccgccaaaggaaacagattcgggcggccaaggccgaacatgaggacgttttggacggtccacgggccgatgcctctgatggtgatcagctttttcataatgtcttcatccgataaatgggtaagttccgccagattgagcgctccgtctgcaatcatgcgtgaaatgtcaatcgcatattccgcttttctcatgctgaactggagctcccgcaagtcctgataatcaagcgccgcgatcgttttcggctcgggatagcaccagacgccgtctttttgttcaccgaaggcatggacgaaccgttccgttaaggtaaatgcgaaagacaggttgagctgctggtggatgatgcatttcatgagacagttgtagacgtcatattccaagacgagcggggttcccgcatgctcctcaaaaagcgccgacagatttgtttttgagaaatgatcaagcacaggctgaagcggctgttcccattgaaaaatgtgtttgatccgttcaatcatctcctcgcggtccgtttctccgctgacgaggaagaccgggtctgcggcggtgccttccgcttgaaccgtagtgacggacagtttgccgtcccgtgttctgagcggcactttgattgatcttgcatgaagatcgaccgcattcagcggatcgagcgacagcctctcaaggactttatcaaaatgatacggcggcgtgaccgaaaccgtttccttccacatatgctccacccctttttgtccaagtatatcatgaagcgggcgggcggcaattcgtatacttttcttcataacgccgcatgatataatggcaggcggagggttgtttatgatacatataaccgcaatcacaacacataatgagatattagataatatccccctatcacgtacagaacaaccggacatcgcatggtactggatcgattttttcggcgctgagatgcatgaaaccgagctgctgcgggattattttcactttcatccgcttgcgatcgaggattgctttcagcatatgcagcggccgaaaatcgaccattatgacggctaccgtttttatgtgctccacgccttgaacccggacacactggaaatggaagaggtggacatctttcagtccgaccgtttcatcgtcagcttccatttgcacgaatcgcccggcgtctcaagggtgagagaacggtttttcgcttctccgggattagccaaaaaagggccggggcacatcacttatatgattatggatcagcttgtcgatgaatatttccccgtgctgtacaaaattgaagaccggctgaatgaaattgaagacagcagaacacataaatcttacggcactttaatgaatgaagtgtttgaattgcggactgatcttttgaacctgagacggacgatcattccgatgcgcgatttaatgtaccggattttgagccttgaccatgtaaaagaaagccgtgaaacgaaggcgtatttcagcgatatttatgaccatctgttaaaactggccgagctgatcgagtcaaaccgtgatatgacgtcagatttgcgggacagctatgtgacgctgaattcaaaccggatgaacgccattatgatgacattaaccatcgtctcgaccatttttatcccgctgacgttcatcgcgggggtttacggcatgaatttcgataacatgcctgagcttcattggaaatacgggtattttatcgttttgggcgtcatggccgttcttgtcgccgccatgctgttttggttcgcccgcaaaggctggtttaatattttcaagtaagaacggctgccggctgttcttttttttgagaaaacatgatagtctggaaaaaaacgtaaagaggtgtgcgccgttaccatcctttctcataaaatcatttcttctgtcctcctgcttttcagtgtcatgtccattgccccgctgtataacggccgtacggtgtctgattacatctttgagtcgctcggcttttcttcctggtctgaagacggagcccatatctccgtcattcccggggtcgtcctttactttgcggcgttaatctggtgtgccgccgcgttcaggcggacgcttccctcggcggggctgtttctgatctttctcagtatgggggccgcttccggtatcagtcctgccaccgaatatgccgctttttccttaaaacagttcgcgcccgaaaaagagtctgtcgaatatttgaagcaccgcagcgaatgcagtcatctgattgaacgaaaaagagcgggcatgagctgcacgctttatatcaatcattacggaaaaggggaacaaaccatttctgtcacgccggatttatcagaaaacataaaggacgtcacattcaaatcaaaaacattcactgtaaaaccccgttcaaaaacaatcatcaaaacccgatttaccggattttataaggggacagccgcctcagactccggatggtcttcagaaccggaactgaaagtggcaatcctgtacacagcagaataaccattttgcatgtataatggtggaaaacttttcattggagggactgtcaaatgaagatcgccatcgtcggactcggcaatatgggccgccccatcgccgaaaatatcatgaaagccggatacagcctgactgtatataaccggacgaaagaaaaagcggctgacctgctggataaaggggccgaatatgccgaaacgccccgccaggcagctgaacatgcggacattgtgctttcaatgctgtcagacgatgaagctgtaacaggcgtgacgttcggagcttgcggcattattgccgggttatctgaaaacggcattcatatttcaatgagcacgatcagtacggcgctgtcagaacagctttccgccgcacattcgggcagagggcagtcctttattgccgctcccgtcctcggccgccccgatgccgccgagaaggccgagcttcgcatcatcacagccggaccggcagaagcgaagaaaaaggccgaaccgctgtttaacatcctgagtcagcaagtatttgacacgggtgaagaaacaaaaacggcaaatgccgcgaaaatcagcatcaatttcttgctcgtttctatgctggaggcgttatctgaatcattcttaatgatggataagttcggtttagaacaaaaacaatttctagaaatcgccaacgcactctttggctctcccgtctatcaaaattacggcacgatcatggctgaggagaaatttgagccggccggcttcaaaatgtctttagggctcaaggataccaatctggcgctcgccgccgcagaacaggtttccgcaaaactccctcttgccgaactggcgaagagccattttgaaagcgggatcgcacaaggctgcggagatttggattgggcggcattgattaaatgtatcaaataacaaaacacctctccattaccaggagaggtgttttctacaggcgcggcagcttcatttctttctcaaacatcaggtcatcaatgcttttaaacgtgtagccttcttttttcaaatcggtaatggcatcgtccagagcttctgaattgtcctttgaaacggtgtgaagaaggtagatcgcgccgggatgcgcctgctttatcatgtgatcataggcgtattgttttcctttttgctcgttaaccttccagtcgacaaatgcgacggaccagaaaaccgtttggtagccgagacgcttcgtttctttgaggacatattcgctgaatacgccgcgcggcggacggagatacaggttgtcccgctttccggtaatgttgtacacagcttccgtgacggaatcgagttcgtcttgaatctgatcgcccgtttttgtcgtcagatcaggatgatgaaaagaatgattgccgatgatatggccttcctttgacatccgtttaatcaaatcaggctgctctttcacaaaatgacccgtgacaaaaaaagtgcccgtgacgtgatgtttttttaacacatcaagcactttcggggtgtacccattttcatatccgttatcaaacgttaaatagatggtcttttctttcgtattgcccaaataaaaggcatcatattttttgaccagattgtccagctgtctgccggcatccggcggctgatgattgacgctgcgtttaaatccccagtttatccgttcattcggcaccgcttctgcgctgttgatgcctcctgcaagtaaaacggccatgcagcaaattgaacaaaaccatttcatgaccagcactccttctgcatttttccttattttgcagtaggccctgcccttttatacagccgcattatggaaaaagaaaaaccccggcatccgccgggggttattcccaatcctttttaaagcgttcgtattttgcttccagatcatcaagcatgccgatgagccggtctatatcttcaacgtccgttgattcagggtctaatgaatcaatgacattcataaacatatcgagtctgttcttcaggtaatcgagctgctgatctttgctgtttactgcattccccatacttccactccattcattttttataatggtagcgtattttttggcgtttttcaatggttccgctacttgcgatcttggcagatcaggtctaaaattaacagttggcagacgttagtatgcccatttataaaggagttagatagtcatgacacaaaacacagcactgcgtccgattacaccggagtacgatccttgggaagcgtacatggatgtcgaccagtatggagatatgaaactgacgaacgttgaattcacaacgacgactttgtgcaatatgagatgcgagcactgcgccgtcgggtacacgctccagccgaaagacccggatgcgctgccgatcgaccttttattaaagcggcttgatgaaattcctctgttgcgctctatcagcattacgggcggcgaaccgatgctttcgctgaaatcggtaaaggaatacgtcgtcccgcttttgaaatatgcgcatgaacgcggcgtgcgcacacagatcaattcaaacctgacgcttgatatcgggcgctacgaacggattattccttatttggacgttcttcacatttcccacaattggggaacggtcgaggactttgccgacatcggatttgcgatgatggagaagaaaccgacatttgaacagcgggcgcgctattttgataaaatgattgaaaacagccgcacgctggtcgaagcaggcgtaatggtttcagcggaaacgatgctgaacaagcggacgctgccgcatattgaacatattcaccggcagattacggaagaaatgaaatgccagcggcacgaagtccatccgatgtatccgagtgatttcgccagcgcgcttgaatcactcagcctgaaggacatgagacaggccattcatcatctgctcgacattcgcgatgaagagacatggatgctgttcggcacgctcccgttttacgcatgcagccctgatgaagaagaccagaagctcctccgccgcctgcgggaagcgaaaaacgttacggtgcgaaacgaccctgacggccgctcccgcctgaatgtcaacatttttgacggaaatatcattgtcacggatttcggcgatacaccgccgctcggcaatattaaaacagacagccttcccgatgcatatgacaagtggagacagacgaagctgagcaaagagctgaactgccgctgcacaaacgtccggtgcctcggaccgaacgtccttgtcaaaaacagttattatcaggacacggatttttcattacgaaaagccagaggttaacagaagatggaaacgacaattacggatattttgaaaagcaaagtggttgagatcatcatcgtcgctctcgtgctttacgccggtgtttttctgatcaaccgctttgtccaggtgttatttaaacgcatagatttcttggaggaacggaaagggaaaacgattgaaagcctcgtccgatccatcacccagtatacggcgacgatcggttttatcttttacgtcatttcgttattcgttcatgatttcggccgaattttagccggggcgggtgttgccggtatcgtcatcggtttcggcgcccagtcgttaatcaaggacatattggccggtgtctttttgatatacgaacgccagcttcataaaggcgattacgtgacgattaacaatctgttcaacggcacagtcgaagaaatcgggctccgttccctccagatccgtgagtggaccggcaagctgcttaccatttcaaacggtgaggtcagacagcttcaaaactataatattgattttatgcggattaccgagtccgtcgtgatcagttataaagaagatcccgagcgggtatatgccgtcttagaaaaagcctgcgacatgctcaatgatgagcttcgcgattcactgaagcgggatgaatttctcaatgcgacggagccgtttcaagtgcatggaatcatgagcctgaacaaattgacgagaggcatagaatttaccgtcaaaggcatggttcaagataaagaatacttctcggcaagccttgcggtgagacgcgttcttgcccgggagctgtacaacaacaatgtgcaattgcttgaggaaatgtatcacacacaaaaaagctgattcccgaaccggaatcagctttttttatttatctcggctgcgctgtcatttgaaaaccgaatgtgacgtgatcctgcaccggaatccaagccccgattccttgcgaagtcacatttttgacgacaagtttccgcttgctgcctttcagcaccaaatacacttcaccgtatgttacttttcctttttcattaacggccggagcgtaggcgtgcaggtagccgagccgctgcggagaaattttgtaggtttgatcgcgttttgtgcctgcgccgataaccgtttcaaacgcgagcggcagttttgttttcttcatcgctttttgcatcatcatgctttttacgtcttctgcgttcggcaccttcgctgtgagcccgcctttaattttgtactgctgttcttgggcgtatgagataaccgcggtttgctgtccgccccggttatccgctctgttcgtattgatttttttatattcccagttggcgaccgtttcgttcgattgatagccgagcgcccatttcccgagaaatattgtcgcccggtagccgatggcaagcggtgaaccggaaaccgaggattcattcagcatttttatcagatgcggattttcgatgttgatctcggatgtatctaacaattcctttgccagtttgctcggctgaagcatcggctggtcctgtgaagcattcggatacgtattttcctttgaaatgcttacaacagagttgggaaccttaaacggtttctttgcaccggcagacggcattgcgaaaaaactaaaggataacagcagaatcagtgtggcatgaaacagctttctcatcatatcactctttctatagcattttcctttagtcttttcctccgcaatcgttgttatccgcattttttacaggttaaagcaggaaaaaaccgatcgccatgatgacataagcggcaaggagcgtagccccttcaaaccagttcgaatcgccgtcatttgaaatcatcgtcatcaaaaggacggatgatatcatcgccacaagctcgggcaatgtgaatacaagcggcatattgaccggaaaaaagatagaacagatcacaagaaccggggctacaaacatggcgatctgcaaagtcgaacctaccgcgatttcaacggcgacatccatcttgtctttgtacgccataataatcgccgacgcatgctctgcggcatttccgacaattgcgacgataatcaccccgataaacagctcgctccagccgaactgttcagccaccgcatgaaacgtatggacaaggttttcagatatgtaggcgacaataatagttgaaataaataagacggctgtcgctcttttccccgaccactctggctgctcctcttcttcctttgcctccggctgattcggctgataaacaccgcggtgagtgacgagcttgaaataaagagctgccacgtacaaaaggatcatgatgatgctgatgccgacactcaaatcaagcttgtttttttcccccatatctatggaaaacacttcgggaatgacaaaagctacgataatggcaaaaatcagcaggcctgaattatgccgggcatcatgaatattgaattcctgccgcttgtatttcaaaccgccgataaaaaatgacaatcccgcgacgagcaaaagattgccgagcaccgaaccggtcagtgaagcaagcacgatgcccgtcagcccttcttttaaggcgaaaatcgatataatcagctctaccgcattgccgaacgtggcattcagcagaccgccgatccgcggtcccgcgataatggcaagagattcagtcgctctccccatataacttgcaagcgcaataatcgtcaagcaataaataataaacaaaaccgctgacggccagtgcatcaggccgccgatgactgaaagcggcactcccgccgcagccgtaaagaaaaaaatccgattcatatctgcctggctccttttttcgaataagtctttttatatccttctcaaaaactccttcaattacacttcctcggcagcccgaattggcattttcaggttgccggacgcggcaaatccgtgtacgatcaagaaagatactgaagaaggagaaatacgcgatgtcacgactgtacttctttattttggttctgcttgtttccatctccggattttcccaaggcatgcttctgccggtgatctccgtcatttttgaaacgaacggagaatccgcagccataaacggacttcacgcaaccggcctttatatcggcgtgcttctggcgtcgccgtttatggaggccccgctgcgcaagctcggattcaaacctctgatggtcatgggcggatttcttgttatcatcagcttattcagttttatttggcttcaatccatatggttatggttttttcttcggctgcttatcggaatcggggatcatatgctgcatttttcaacccaaacgtgggtgacttccaagtcaacgccccgaaacagaggaagaaacatttcgctgtacggactgtccttcgggcttggattcgctgtcggcccgttcatggtccctcttgtgaaaacaagtccgtcccttccgtttatcgtatccggctgtatcagtctttgtgcctggctgtttgtgtttgccttacgtaacgagtacccggcgcaaggtccggatgaaacatccggggacaacagcgcaaaacggttttaccgcgcccttcttttcggctgggtcgcttttctcccggctttcgggtacggttttttagaaacggcgctgaacggaagctttcccgtgtacgcccttcgtttaggcatatccgtggatgccgtcgcgctgatattgcccgcttttgccatcggaagtattgtattccagttccctctcggtttattaagcgatcgattcgggagaaaacgtgtcctgctcgtcatcttattaacgggtgccctttgctttttgacggccggactgtttccgtcgccttctgtcatcggctgctgctttttcacggcggggatggcggtcggcagtatgttttccctcggcatcagctatatgagcgacctgctgccgtcccatctgctgccggcgggcaacctgctctgcggcatttccttcagcctcggaagcatgatcggcccggtggcgggcggctggtatatgcagcggtttgaaagcgccaacttgttttactttattacggtgattctggtctgtatttggcttgcgctcgtcttcgggaaaacaaagcacagccccgcttccgaatcccattcttttccggccacataaaaaagccgcctgatctgagccaggcggcttctttctagtggtatccgttctgcccgttggcgcttccgcttgttttattcttcgggccgttttttgagttttgtttattatggcttccgccttttttcgtatgcttggtcatagccgattccctccgtttttcagcttgaacgtcatccgttcctctatagcttgctcccgcggtacggattttcatcaggaagctttttacgtttatgtaaaagcgcgttgatttctcctcctaaaatcaacaaggttcccgtaaggtaaaaccagatcatcaggacgataattcccccgatgctcccgtatgtggcgctgtagttggcaaaggtgccgacgtaaaatgagaacagcatactgacgataatccagccggctgccgcgaatacagctcccggcaggacaaaacggagggaaagctttttattcggcgcgaatatgtaaagcgcggtaaacacgattaaaaggataagcggactgataccccagcggacaaccgaccacacctgcaaaaacaggtccgaggcgccgatgaaatccgcggccagcattccgatttctctgccgaacaccggcagaagcagtgcgattaaaatcgtaaccaccatcgcaatggttaaaaaaattgaggtcaggcgaatgatgataaatgagcggttttcctcgacttcgtaggcatggttaaatgctctgacaatcgcgttcataccattcgaagccgaccagatgacggcgataatcccgaatgacaaaagcccgccgctgcgcttgttcagcgtttgctccgttatggatttcaccatggacatggcgctgtcgggcgcgtattgatcgaccgccccgagcacgtcttctgccgatatgggaagataggcggtgagcgtcagcatgaaaatcattaacggaaacaatgacagcaggaaaaaatacgccagctccgccgatttactttgtccttcatgcagagaaaaccttgcaaacagctcctttataaaactcatgacatcccacctcaatgatcgtttttcgaaaaatgctccttcgtttcttttaacaggtcaatgacctgcggtgtcgtctgcttcagcttggtgatctgcccgtttaaaaaactcagatcttccgatacggtattggcgaagattttcacttgatccatttttgcggaagcctgctgcttcagggcttcaggatgttttcggtaaaatgccgcacgccgcctgcacgcgtccatgttccggaaacatgcctctctcgtcggcttatgtaataaggacagtgctccgccggcggcagcgccgatcagaatggcttttgccatgatgcgtgtctgcttcatcggtcaatcccccttataaatgatggtctttctttattgtctccagcaaatgacggcacccggactcgaccaaagcgtacacctcgctgaaatttccggtataatacggatcgggcacgtcggcaaggtctgactccggtacataatcaagcagccttgcaatacgcggcgccgcttttttataaccggccatgctgcgcagatgtccgatattttctgcatccatcgcaatgacgtaatcaaaatcggtcagatcagactcacccgacctgcctcgccgtgatgccgcttgcgctgatccctttctccttcaggatctcctttgtcccttcatgcggcggatttcccgcatgccaggcgccgattcccgctgaatcaatgttaatctgcccgttcagcccgtttttcttcaccatatcagaaaataccgcctctgccataggcgaccggcaaatatttcccagacagacaaacagcacatgtatcatatcgataacctccctattctttccccgcattttgaggatcaaaaaccttatcaacatcttagcaatttttctgcggctgtggaaataagcttttattctaaatgaattctgttagaataaaggggacgaaaacgatcatgaaaggatgcatgaatttgccgagccaacaaacagaaacgttaaataaaatgattgaagacatttcgcaaaagctcaacatgctcaatgtcggcgtcatcagagcggaagatttcagtgatgaaaaaatagaagatcttacataccttcatcaaatggtcatgaaaaaagcatcattcagcccgagtgaaatgcaggccattgccgaggagctcgcctctctcaggaaataaacccatgtcagacctgccgaaaaacggcgggtcttttttgatttaaaaaagtaaaaaataaaagttcatcggtttgacacatataaaaagaaggagtatagtaactgtgaacttggtagaacgatatactaaatgagcgggccgcttatctttttttgtttagtagaacgatatactcattgtgatatcagcgttattcaagtttgtctatgcaaccgttgtatcaaacagttttcaaagaaaggcagtggttcaataaaggggtatggtgctgtgcttttatcaattaaaaaaataatttaattctttattaaccgcattaggggatgtcatcatgaaaaacatatacaccaaaatggcagcgggtctttatattaactatttcctgctgggcatgatcaatattattatcgcatccaatatggaggcattatcaaaacagcttcatacttccgcagccggtgtcagctatttggtctccgccatcgggatcgggaagctgatttcgcttctgtttgccgggaagctttcggatacattcgggagacggccgtttatcgtgtcgggcgcctttctgtatctgattttcctaatcgggattccgctttcgacaaactatacggccgcgtttatcttcgccattttcgccgggatcgccaattcctttttggattccgggacatatccggcgcttattgaaggatttccgaaaaacgcaagctctgcaaccgtgttaatcaaagcgtttgtatcaatcggcgcgacggtgcttccgttttttatcgcgtttattgcggacaggcatttgttttacggctggacgtttttcgtaccgggcattattttcttcctgaacggcttttttctgttgaaagttccgtttccgaatcataagcaaaaagaagacggcggccggacggaagcctctccgtctgatgacgcgttcacatcacagccgtcgatatggcgcgaaggcgttgcgatcattctgttaggcttttcatcaacggcgctgtttatgctcgttcaagtatggcttcctaagttcgggcaatccgttttgggcatgcctgaggtgcaggccgtcaaattgttgagctattacagcatcggggcgcttgtgtccgtgttattgctggctgtgctgttaaacagagtgattcagccgattacggtaatggtgctgtaccctgtgatcgcggcaatcgcgctgcttgctctgattttcattcagcagccggccgtatcggtcatcagctcctttgtcatcggactttcaactgcgggcattctgcaattggcgatgacggttatggctgttttattccctaaaaataaaggtacaatcacatcttttgttaatatagcatcaagcttatcttttattgtcattccgcttgtaacgggagcgatatccaaagccgccggcctgacgcctgtttttctgcttgatatcggaattgcggccgtcagcgccctcctcgcattgtttatcggaatccgctttaagcaagtgatgaaagcctgactattttttaagggagaggatttatcatgcaatctatcacaatcagaaacacggtcatcggtgaagggcttccgaagatcattgtgccgctgatggcggccggagagaaagaactgctcgaagaaattgaagccgtcaacaggcttcgcccggatatcattgagtggcgggcggatgtatacgagcatgttgacagcctggacgccgtaaaaggcatgcttgaaaagctgcggaaagccgcaggagcaacaccgctgcttttcacattcagaacccataaagaaggcggaaataaagttattgatgaccgcttttacattgaattgcttaaaaccgccatcgaaacaaaacatattgaccttgcagacgttgagctgtttacgggagaagcggaagtcaaatcaattgtgaaaaccgctgaagacaacggcgtatatgtcgtcatgtccaatcatgattttcatcagacaccgaaaaaagaagaaatcatttcccggctccggaacatgcaggcgtacggcgcgcacattccgaaaatcgcggtgatgccgcaaagcactgaagatgttttcgtcttattggatgccactcacacgatgaaaacacaatacgcagaccggccgatcatcacgatgtcaatggcgggaacaggcctgatcagccggctggccggcgaagtcttcggctcagcgtgcacgttcggagcgggcaaagaagcatcagcgcccgggcagattcccgttgaggaattgcgcagcgtactcagcattttaaataaacatatgtaatcagcgttttttgccctcaaagcgggaggaaaaacaaatgaatggactaacggaggaatacatcatgaagaaagaattaggacggattaacggaaaaactcagcttatcggattattcgcgacaccgatcggacactctttatctccggcgatgcacaacctggcgtttaaaaaattaggattgaactacgcttacctcgcgtttgaagtcggcaatgaacagctggaagatgtggtaacgggaatgcgcgccttaaacgtcagaggcttcaatgtctcgatgccgaacaagatgaacattctcccttatctcgatgaactcgcggattcagcgaaatttaccggcgcggtaaatacagtcgttaatgaaaacggcagactgatcggacactccactgacggtatgggatacgtccgcaacttaaaagaacacggcatcgatatcacagggaaaaaaatgacgctggtcggttccggcggggccgccactccgatagcgattcaatccgcattggaaggcctcggagaaatctctattttcgcccgcaatgacgcgtttttcgaaaaagcggaagaaaatgtccgcatcatcaatgaagaaatgaagggatcttcttgtaaagcgaaagtcttcccgctcgaagatcaagatgcgctgcgtgctgaaatcgcttcaagcgatattttcacaaacggaacaggtgtcggcatgaaaccgcttgaaggcttgagtgttattgaagatacatccatgctccgtccggatttgattgtgacagacgtcgtttacaaccccgttacgtcgaaattgcttgaacaagctcaagcagccggctgcaagaccattaacggtctcggcatgatgctttggcagggcgccatggcgtttgaatattggacaggccgtgaaatgccggttcagtatattaaagagcaaatgtttgaataacctattgtgacagaagcgccgaaggacaatccgtcttccggcgctttatctttttccccctcctctctctttcttctcatgcgccaaaacgcttataatggatgtaacgaataaaaaccaagtgaggaatgcgacgtatgaaacagcaaaaaaaacgccgggtgacattgcagcaggtcgccgaacatgccggcgtctcaacatccaccgcttcattaattgtccgcaataatccccgaatttccgaagcgacccgtgagaaagtgctgcaatccatgcgggagctggggtacgtatatgatcgggtcgccgcgaatttacgatcacagacgtccacaacggtaggattgattatcactgacatttccaatacgtttttctcagagtttctgatcggcgttcagaatacgcttgaggaagtcggattaacggtgctgttaggcacgacatttgattccgtcgccaagcaggagcagctgatctcgaccatgctggagcacagggtcggcggattgattttgtgtccggtttcagggacggctgaggaaaccctttcccgccttgagcagcttgacattccggtcgtgctcgccgtcagggagattgccgatgccaactgtgattttgtcggagccgattatgaggaaggcacctataaggcagtgcgtcatttcattgagaaaggccatcaggagattgcgtttctgggcggcgtgaagcactcatcaacatggacgaagcgtatgaaagggtttaaaaaagcactccgtgaagcggatctggaagtgaaaaatgaatatgtcattgacagcgcgccgacccgcgaagcaggctgtgacgccgtgacggagctcctccgccggtctgagcgcccgaccgcgattttctgcttcagtgatttggtcgcattcggcgtcatgcaagggatcagaaaagccgggctcgttccgggcgaagatattgacattgtcggctttgataacgtgccggaagctgaaatttcttatcctccgcttacaaccgtttcttcctttccgcggcagtcgggaaaagaagcggctcaattgctgcatcataaaatcaccaattcccagcacaaaaaacaacgcattattctggcgcctgagctggtcatccgggaatcttcacaaaaaaagcggaacgcctgatacggcgctccgcttttatattacgcaagcagttttaatgattcgcggttgaatgccggaatgtcatccggtgtgcggcttgtgaccagctggttctggcagacgacgacttcttcatccaccacattcgcgcccgcgttttccatatcgattcggattgaagtaaatcctgtcgctttgcgcccgtccaatgctttcgcgttgatgagaagctgagggccgtggcagatagcgaacaccggttttttatcatccataaacgctttggcaaattggacgaaacggtcatccgcacgcagcatgtcaggtgagaatccgcccgggatcagcaatgcgtcaaagtctttcggattcacatcatcgatggacgcgtccactttcacttccgcttccccttgttttcctttgactgtttttcctttttcctgttcaattacggttaattcatgacccgcatctttaaaagctttcgcaggttcagtatactcgacatcctcaaagtaatccgttaatacaactgcaatttttttacccatagttactacctcctgcttgatgaagtctacataaatccatgtaccccagccacactaacatcaaacataggtaacgcgtttaccgcccgcctgttttacataggtcattatcctcattttttatcttttcacaagaatcatcatgaaatctatataaactttcacaaaatattcttacaatggtactgcatgacaaaatttgttgaaaggtggagaacaggtgagaatacagaaaagacgatgcagcgtcaatatgacactccgtattctgctgcccctagttatgatacttagtctgatcctcccaacatcacccattaaagcagaagaaaacaaatcctccagtgtgaatctcagcattttagccacaactgacgttcacgctaacatgatggactacgattactacagcgacaaaccgacaacggaattcgggctggcccgaacggctcagcttattgagaagcacaggcgcgaaaacccgaatacggtgcttgtcgataacggagacctgattcaggggaatcccctcggagaatacgccgtaaaatatgagaaaaatgatatcatttcaggcgcaaaaacccatccgatcattgaagtgatgaacagtctgcattatgacgcaggaacactcggcaatcatgaatttaattacgggcttgaattcctggacgggacaatcaaaggcgctgattatccgatcgttaacgccaatgtgaaaacagtaagcggcgaaaaccgttatacgccttatgtcataaaagacaaaaccgtcacggatgaaaacggcggcaagcatcagctaaaagtcggctatatcggctttgttcctccccagatcatgacgtgggataagaaaaatctcgaaggccgcgttcaggtcgaggacattgtggaatccgcaaagaaaaccgttccgaaaatgaaagctgaaggagccgatatcgtcatcgccctcgcccacagcggcatcgaaaaaaaagcgcagtcttccggagcggaaaacgccgtttttgacctggcaacgaaagtcggcggaattgacgcgatcgtatcgggccatcagcacgggcttttccctgatgccgaatacaaaggcgctgctcaattcgacgtcgataaaggcacgattaacggcatccccgttgttatgtcaagcagctggggcaaatatgcgggcgtcatcgacctccggcttgaaaaaacagacagcgcgtggcatgtggaagatgcaaaaggcagcatcgagccgattgccggcaatgtgaattcggaaaacgaaaccgtcgtcaataccgtcaaaaaagcgcacgaaggcactttgaaatacatcagagaacccgtcggccagacaaaagccgatatcaacagtttcttcgcccaagtcaaagatgatccgtccattcaaatcgtaacggatgcgcaaaaatggtacgccgaaaataagatgaaggatacggagtacaaagatctgcctatcctctcggcgggcgccccgtttaaagccggcgggcggaacggctcaaactactatacaaacatttccgctggcgacctcgccatcaaaaacatcggcgatttgtacctgtatgacaacacggttcagatcgtcaagctgaacggaagcgaagtgaaagactggctcgaaatgtccgcggggcaatttaatcagatcgatcaggcaaaaggcggcagccaagcgcttttaaatgacgcctaccgctcatacaattttgatgtcattgacggtgtcacctatcaggtcgatgtcacaaaaccggcgaaatacaacgaaaacggaacagtcattcatcccgatgcaagccggatcgtcaacctttcttatcaaggaaagcccgtcagcgccaagcaggaatttctgatcgtcacaaataattaccgcgcttcaggcggcggaggattccctcacttaagcaatgacaaaatcgtatactcttctgccgatgagaacaggcaggtcttaatggattacatcatccagcagaaaacgattaatccgcaggctgatcataactggtccatccttccggtcaaagggacaaatctgacatttgaatcttccttggccgcaaagccgtttgccgaccgcgcagatgacgtcgcctatatcggtgaatcacaaaacgcgggctacggacagtacaagctccaattcaaagatgatgaaccgggcacagatccgccgaaagatgacgcatggaaactcaccgttatgcatacaaatgacacgcacgcccaccttgataacgcggcgaggcggatgacgaaaatcaaagaaatcagaagcgaaaccgaccgcagcattttgctggatgcgggagacgttttctcaggcgatctctatttcacaaagtggcaggggctggctgatttaaaattgatgaacagcatgggctacgacgcaatgaccttcggaaatcatgagtttgataaaggtccgggtgctctcgccagcttcttgagcggtaacgggagcgcgtctgacccgtccgggaaatacaattttcaagcacctgactttccgctcgtcagctcaaatgtcgatgtgtccaaagagtcaaaactcagaccattcatgaaaaaagcagacacatttacggcagggaaaaagaaaaaagcaggcatctatccatatattctgcttgatgtaaacggagaaaaagtcgccgtattcggcttgacgacagaagatacgtccgtcacatcaagcccgggaaaaagcattgtctttcatgatgccttccaatccgcacaagatacggtaaaagaaatacagaacaaggaacatgtcaataaaattatcgccctgacccatatcggacatcagcgtgatctcgatctcgccaaaaaagtaaaaggcatcgacttaatcgtcggcggacatacgcatacgcttgtagataaaatggaaattgtcaaaaacgaagagccgaccatcgtcgcccaggcaaaagaatacggcgaatatttaggccgtgtcgatgtcgcatttgacaaaaacggcgtcgtcctgccggaacaatcctctcttcaagcgctgccggtgaatgagcagacgaaagaagacccggatctgaaaaaagagcttgatccgtttaaaaaagagctcgtctcagttaaaaatgaaaaagtcggttcaacgaaggtcgcacttgacggccggcgcgagcatgtccgctccaaagaaaccaatctcggaaacttcatcgcggacggcatgctgcaaaaagcgaaggaagcggccggcgcccaaatcgcgatcacaaacgggggcggcatccgcgcgggcattgataaaggagacatcacactcggcgacgtgctgaatgtaatgccgttcggcaacacgctttacgtcgcggatttaaccggaaaacagatcaaacaagccctggaacaaggattaagcggaattgaggctcaaggcggcgccttccctcaagttgccggtttaacatacacgtttacactgaataaaaagccgggacaccgtgttcttcaagcttcggccgtacaggatgacggcagtgtaaagccgatttctgataagaagacatacagagtcgccaccagtaactttgtcggtgaaggcggagacggatattccgtctttaacgaagcatcccataaagaagaccttggctttgccgactatgaggtcttcgttgagcagcttgaaaaagcgggaaaagcggtggaaccgaaagttgacggccgcgcgcaggaagtgtacctgccgacaaaacaaaaaaacggttcgtggacgcttgaagatgacagcgcatttgccgtctatgccaaaaacgccaacacgccgatcgtgtattacgataagaatgacggcgccaaaaagccgattgatctcagcgtgaccaaaaaacaaatcggcctgttaaaggacagaacatcggattcttcccttacgatcctgcatgacaagttcagcatgaaaatgccgatggcaaacgccgcttcagctgatacacgattcggcgtggcgccgaaaggaaaagttagcggggcgctttcaaatgtatacgactttacaatgaagcagaaaaacaaagacatcaaaacattcaaagcgccggtaaagctcaccctgcgcattgagaatatgaaaaaggcgaaacagcccggcatttatcatgtagaccggaaaaagaacgtctatacaaaaacagacaacggttcggtttcacacgatctcgtcacgggctatacaaatcatttcagtgaatacaccatattaaacgcaaacacgaagagcgcgccgccgacaagcggagatcacggctccggaaagcagccaagcggacaaaaaccgtcatccggccctgcgcaggacggagtatcgccgggcggcctgcttcctgatacagccacaacgatgtattccatccttcttgccgggttactcatcagcgcgctcggaacggcactgtatctgtaccaaagaagaaaagcaaaaaaagtgaacgaagcataaaaagaccgcttttatcgggcggttcatcccaagagctctcctgatctgatatcaggagagctttttctgccggtcccctctgagtcgacagccgtacggccgagtgataaaatatgaacgttattcgcgaaagactgcatccgcatcgtttaacacttcacggcggagcctctcttttacacggcgccgcctgtttggaggactttttttgaagattacaggaaacaaacgaaaccgcatgtcttacaagaaaaagctgttttacgtgataacagcgctttgttttatcagctcgatcatttttgtcactcacaacgcttctttttatgagcggccgattgccagagtgacgaaaacaactttggaacaccaggcaaacgtacaggacatgcataaaaacaaagataagattttcaatcagacgatcactgccagacttgaaaacggcagtcagaaagggcagctcattcatttgtccaatcagtattctttatccggagcgaatgatcagaaatattcgattggcgatgaagtattcgtttctattgataaagggaaaccatcaaacaaagatatatcgggaagcattatagataaaaaacgggataaacagcttttgctgatcgcttgggttttcatcttcaccttgcttatcgtcggaaaaaaacaaggcttcttttcgatcgtcagcctgatgtttaacgccgttttactgtcgtttgcattagatttgtacaggaagcatcctaatatagggttaatttttatctgcggtatctgtattctcatctttacggtcatctcattgctgcttgtcagcggttttcacgcgaaaacatatgccgccatagccgcgacgctcgcaggcactttcgtttccctgctgattacgtatctggtgatgctggcaaccggagagaaaggtctcagatatgaggaaatgcagtatttaacccgcccttatcacacggtgtttatggccggggtatttatcggatcactgggagcggtcatggatgtagccattaccatgacgtcatctgtcttcggattatatgaagaaaacaagggtatctcattacaagctctcagacgttccgggatggagatcggaaaagacatcatgggagcgatgaccaatattctgttttttgcttatataagcggctctattccgatgatgcttttgtatttgaaaaatgattccccgataggattcactctttctatgaacatttccttggaaatagccagagcattggccggggggatcggaattgtattaaccatacccgccagtctgtatgcttctgtcttttttattaaacaaaagaaggcaagctcatgaatgtcatcgtaattctcgcggcgattttatttctattaatggtcattatcggcggaaaaaaaggagcgaggtcttttattgcgttattcttaaatttcggggttctctttctcaccattattttcatgacagatccgcatatcaatccgattgttttaacattgctctcttccgccgtgatttgcagcattactcttttttatattaatggaggaaacgtcaaaaccgtaaccgcctttatttctgcgatgctgaccattgcattgctgctgttttttattatgtccgtaacaaaacatacttcgattcagggattcggtgaagaagaattgggggatatcggcatattcacactgtttgtcggggtggattttgtgaaggttaccgcagctatgatcatcatgggcacgattggggcgattactgatgtcgcgatttccattacttcacccatgcgggaaatttacagtcataatccgtccatgagcagaaaagaactgtacacattcggattaagcatcgggagagatattttaggaacgaatacgaatacgttattctttgcttttttcggcagctatttggctttaattatctggtttaaagacttatcatactcagctgaaaaaatagtgaactcaaaagtattcagtgcggaagccgtcaccattctttgcgccggaatcgggatcggcatcatcattcccgttacgtcctggatcaccgcctgttttttagcaaaaccaaataaacattaaaagctgccgggacacgcccggcagctttttttatcttatacccactttacaacgtcttttgaggcagatcttgttttcgggcgcggttctctgacacggtagccgaatgcggccatgacagagatgtcgaaacttccgttttccagaagcccttcttcttcaagaatccggtggatctctttgtagttgaagccttcaacagggcaggaatcgatgccgatctgcgcagcggctgtcatcatattgccgagggcgatgtaagtctgtttggatgcccagtcaaacagcgcgcgatctgattcaagcagattgaaatcatttttctggaagtcttccgttttgctgatatagccttcatacatatcttccggcatttttttgacttcccgcaagtggtttttgacatagtcggcgtcaaaacggatatcctttgccgtccgggcaagcagaagtacgaaatggcttgcggtcggcagctgcttttgcgccccccatgtgaactcgcggagtttttcacgaagctccggattttgaacgacgacaaatttccaaggctccaaaccgagtgagcttggggataatcttcccgtttctaaaatgaattcaaaatcgctttctgaaatttttttctcaggatcaaattcctttgtagcgtgtctgaattgatacgcttcgatgatctgctgttttttatctgacattcatgatctctcctttttatctcgttatgtactattgtagccattatttttgaaagtaccagtacgcacatttttgttggatagtattcattttgatactgacaaaaaaacgggctgccgcggcagtccgtttttatttttctcttctcgcaaagtcgacgaaacggaatttatcgagcctgtgccggctttccgtgtactgaaagaggctggtatcctccaaaaagacgcggtttttcacgaccgccatatggctgaacccgccgagatccaaatacttccggtcttcctcccccgccggctccacgacaatttccttttgcgcgtagctgatggacaggccgagctctccttcgagatactcatagatcgaatcttcacaaatcgccttcgttaatagaggcacatgttttttcacaaagtaatccttgtccaaaataatatgttctccgtcaatccgtcttgatctgacgacttcccacaccttttcatccgccactgtaccaagctcttttgcggcttctgagggaggcaggatcagcccgagacggtgaacctccgttcgcgtctcttttccgagcgtttccgaaagctctttgaagctgatcaggcctgagacgggaaagcgcattttttctctgtctaatatgacggagcctttgcctttgattttctggatgtagccgttttgcgccagcatattgagcgctttacggacggtttctcgtgatgtgccgtattgatcgcataaatcattttcagacggaagaacgtcttcagccttccgctggccgctttcaatctgccgcaccatatctttatagattgtgatatatttattcactttcattcatgaccacccagattagtgtatcacgcttttgtcagatgataaacgatcgattcatacggacggagcgtcaatcgttccggccgcccttccctcggttcatcattcgtcagcagcaccgtaaaccgccagccgtccgtgtctttaagcggaaccgtaaagtccgcttctttcccgtagaagttgttgatgcacagaagtttttcatccttgccgtgtctgacgtacgccagaaccgccggatcatcttcagcaagcagctcaaacgttccttcagtcacgatgtcatattcctttctgagcttgatgagcttctgataatggtagaaaattgaatccgggtcccgcaaagccgcttccgcgttaatgtcccgataatcatccgccgccggaatccaaggcgttcccgtcgtgaagccgccgttcggcccgctgttccattgaacgggggttcttgcattgtctcttgatttctcttttaaaatggcgataatgtctttttctgacacgccttcttccttcatctttttgtaaatgttcagtgattcgacatcgcggtatgagccgatgtcatcgaacttcggattgcccatgccgatctcctcaccttgataaatgtaaggcgtgccctgcatcatatgaatggccgccgccagcattttggctgatttcgtccggtatacgccatcgtctccgtatctggatacggcccgcggctggtcatggttgcaccagaataatgcgttccagcctccgccgttttgcatctccgtctgccaaaacgctaaaatccgtttcagcttcagaaaatcaaacggagcgagcgcccatttttcaccattcggataatccacttttaaatgatgaaagttaaaggtcatatcgagttctttattttcagggtttgtgtaccggatgcagtggtcagccgttgtcgaggacatttcaccgaccgtcatgctgtcatatttcgaaaacacttcccggttcatctcatgaagaaattcgtgcacgcgcggcccgtccgtataataagggcgcccgtcacgaccatcctcggcatcaggaaacgattggtctttagaaatgaggttgatcacatccagccggaagccgtcgatcccttttcggaaccaaaaatgcatcatgtcgtaaacctgttttctcatctcttcattttcccagttcaaatcggcctgcgacacatcgaataaatgcagatagtgctggcctgaggccggatcgagctcccaagcggaaccgccgaattttgattcccagttgttcggcgcccggccgtcttccttgccgtctttccaaatgtaaaaatcccgatacggactgtcgggtgacgaaaccgcttctttgaaccactgatgctcgactgatgtatggtttacgacaagatccatgacgacctttattcctcttttgtgcgcttcatcgagaaggcgttcaaaatcctccatcgttccgtattcttcataaatggtgcagtaatcgcgaatgtcataaccgttgtcattctgcggcgaatcgtaaatcggcgtaagccaaatgacatcaatcaaaagcttctgcaaataatcaagcttctcgataataccgttcagatcaccgatcccgtttcccgtcgtatcattaaagctcttcggataaatttgatataccgctgcctttttccaccatggtgtgctgtctgttttcatttttcttcaccgcctgtattgttttgaatggaaagggaaaagggacagcctgttagaaggcgccccgcaggttttctatttttgccgtttcagccgcgcatacccgtatgttcccgcaaacgggagtatcagcacgatcagcattccgatcgcaaacggaccccagtaccggctcataatggagaagatccccgggacgccgccgactccgaccgagcttgcgagaacgcctttgacggagatgaacatccccgcaatccccgagctgatcatggcgatcacaaacggaaatttgtaacgcagattcacgccgaaaatcgccggctcggtaatgcccaaatatgcggaaatgccggccgtcagtgaaagcccccgctgttttttatcttttgtaatgagcatcatggccagagccgccgatccttgagcgatatttgataatgcgagcatcggccataaaaatgtgccgccgagctttgatccgattaattgaagatcgaccgcgagaaacgtatgatgcatccccgtgatgacaagcgccgaatacagccctccgtacagcaggcctccgatggcggagaattggccgaaaacggcaatcaatcccgccgtcagcgcgttaccgatcgcaaaggtgatcggaccgatgataacaaaggatagaaaaccgatgaccaaaagcgtcaccggcgcgacgaccaacagctgaatgccctccggcgtccgtttcgtcaaaaagagctcaagcctggcaagtaaataagacgccagcagaatcgggagcacctgaccttgatacccgactttctgcacctcaaggccgaacaagttccacaccggaatatcgccgctctgctcggcggccccgtatccccatgcgtttaacagatcaggatgcaccagcatcagcccgagcacgatgcccaaaagcgggcttcctccgaaccgcttcactgccgaccagccgattaaagccggcagaaaagcgaaggccgtccccgcgatcagattaatcatattggcaagatccgcccattgcggatacacttgaacaatcgatttcgtgctgtaaaaaatgccttccgccgttaagatattgttcagacccattaaaagcccggccgtgacgatcgccggcaagatcggaataaagatgtccgcaagcgttttcatagcacgctgtaaaggattcattttttgcgatgccgccttcttcacgtcatccttggacgcttccccgatccccgtttccttcactaattccgcatatactttgttgaccgtcccctgcccgatcacgacttgaaactgcccgtttaccgcaaaagatcctttgacaatgtctattgcatcaagcattttttggtttaccttggtttcatctattaatgcaaaccgcaaacgcgtcacacaatgagtcgccgcctcaatattttcgattccgccgacagcttcagcgatctgccgcgcagcccggttaaactcacccatgccaacccctccgtaaccgttttcattttgtctcaaaaaacttgtatatacatgtttatgactctattgtaatgatgtatatacatgtcgtcaatctatttttatagcgctttcatcacaaatatactgcgaaagaccctgaaacaaaaaaagccccgccggaaccgggccttgacttcttgtttggtcgggaacatgtccgggcggaattcacaacaggagcacaaaaagcatacagtactgtacaactaagttaaagaggtgtgaagagatgccatccactgttatcaacctgtactatttgaagattaacagtatttctggcaacggatctattacgattggggaagcggcatacaacagtcccaccacaaataacaaatcacaaggactgaactcttcattcggcgatacgtcacctatagaatcgatgatggagaacttgttaaatgatcctgatgtcaacgaccagacagccatcggaaccgcagataccgcaaatattacgccggtgccgcccattatagattaaaggggtttttatgaatgccttaccaaattaacgtcgtcaatataaaagtaaacggagcaacgcaaaacggaaacgtcgatatcggtcagaccgtacaaaacagccacaccgccaacagcaaatttgtcggcgcgaacttttctttaggggatttttcgccggccgccggatgtttgaattcgggccatcttgaccctgacgtgagcgatcaggatcagatcgccaacccgtcaatgccgatcgcaaatcaaatatagggaggttctgccgaagtggatatcgaaaaaatgagaaagtggcttgagattacgaacgagcacaagcccagcgacttttggaccaatgtcctgaaacggaaatctcccgaagattttttctccttacaaaaaaacaccctgacttatgatatttatcaggatgaacagcacacatttgtcattgtggaaatgcccggcgtttacgaagaagaattgacattgaggctgctgtcaagaacacggctgcatataagaggaaacatcacacccctttttccgaagaacatgggcgtctgccaaaaccggtattacggggaaatcgatgagacgattgagcttcctgaaccggctgagccccacctgttacaggcgcagtgcgtaaacggcctgctccacatttcctacccgcgccttatggagcacattccttttcagaaaaaaatataaagagccggcttacgggcggcccagccgtctgtacactttctccttataatgagaagatgcgggttttgagaacatggctttctcctccgtcagtttgtcgagtctgacttgtttttccgtccgtttgttccgcaggtgatcccgctcctgttcattgcggcacttggcgatcaaataatcgagcgtcatcagctctttcttcagcgcgccctcatcctcggcgatcccggcgttttttaatatgcggtagcccattctgagcgactccggaagatgtgcggcatcgtctttcggcaggggctttcccattccattgatgccggcgaactctccatccttaatggcgcgcttgattttatcttcagccacgatatgcgcaatatccatcactgtttacctctttcttcaatagaatcgggtgtgatcatacggaaattcacatcccagtttgtgccatttgtgttttttaaagctgtcattcaacagatcaaccgccgctgcgacagcgtttttcgccctttttccgatgagccttttccaccttttctatttgctggtttcatggtatattgattacgttcgttttttctatcgttccgtgtaaaccgtgatcggaaaaaaggagtgtaacaatgaaaacatttataaaagaaagaggacttgccttcttcttgatagcggtcgtgttattgtgggtgaaaacatatgtcgcttatattttaaactttaacctcggcatagacaacacgatccagaaaatattgctttttgtgaatccgctgagctccagcttgttctttcttggatttgggcttcttttcaagaagaaattacagcagacagccattattgtgattcattttttattgtcttttttgctttttgcaaacatcgtctattatagattctttaatgatttcattaccatcccggtcatgatgcaggcaaagacaaacggcggccagctcggagacagcgcgttctcgttaatgagatggacagacgccttctacttcctggataccgtcattttgattattttggcccttaagatgaaaaaaccggctgaaaaaccggcgaagaaatcattcagaatcgttttggcttccgccgtgcttgtgttcctgatcaacctcgccgtcgcggaatccgaccgtcccgagcttttgacacgctcatttgaccgaaactatctggtgaaatacttgggcacgtacaactttacgatttacgatgccgtgcagaatgtgaaatcaaacagccagcgcgcgcttgccgattcaagcgatgtaacggatgtggaaaactatatgaaggccaactatgacgtgccgaataacgtctacttcggaaaagccgaaggaaaaaacgtcatctacgtctcattagagtctctgcagtcctttatcattgattacaaaattaacggcaaggaagtgacgccgtttttaaacaaactggcgcacgataatcaaacattctactttgataactttttccaccaaacgggacaaggtaaaacatctgatgcggaatttatgatggagaactctctgtacccgctttcgcaaggttcggttttcgtcaataaagcgcaaaacacgctgcagtccgttcctgcgatcttaaaaggcaaaaagtacacgtctgccgctttccacggaaatacgcagactttctggaaccgtaacgaaatgtacaaatcggaaggcatcgataagtttttcgattccgcttattatgacatgagcgaagaaaatacgaaaaactacggcatgaaagacaaaccgtatttcaaagaatccatgccgctcttaaagagcctgccgcagccgttctatacgaagttcattacgctgtccaaccacttcccgttcggaatggataaagaagacacggacttcccggcgggagactttggcgattcagtcgtcaataattacttccagtccgcgaactatctggatgaatcaattgaacagttctttaatgacctgaaaaaagacggcctgtacgataagtcgattatcgtgatgtacggagaccactacggcatctccgaaaaccataataaagcgatggcgaaagtgctcggcaaagatgagatcactgaatacgacaatgcccagcttcagcgggtgccgctctttatccacgctcccggcgtgaaaggcggccgcaatcataaatttgccggtgaagtcgatgtcgcgccgaccgttcttcatctgctcggcgtcgatacgaaagattatctcatgtcaggttctgatatcttatcgaaagagcacagagaagtcattccgttccgtaacggagacttcatctcgccgaactatacgaaagtgtccggcaagtattacgatacgaaaaccggaagacttttagatgattcagaagtcgacaaaaaagaagactctctcgtcaagactgagcttgaaatgtctgataagatcatcaacggcgatctgcttcgtttctatcagccgaaaggcttcaagaaagtggatccgtcacaattcgattatacgaagcgtgaagattcctcagcagacgatcaaaaagaataaacaaaagccagatcattgatatgatctggcttttttatgttcagctcccggcggcggccatagtgcgcttttgcaggctgtcggaaagaactgaataagcgattactttctttttctgctgcttgacgacatctacatgatcttcgtagctgtatacaaacaccgtcacatctttttttccttttctcgtcttaatgacaagcggatcggctccgttttgcggatgaagataacgctcttcatcccctgggtatatataatgccgttcgataaacacggcttcgttaaaatcatcaatcacccgtcgtttgtcttcgccttccagacgttttcccccgagggaaacggcagcggactcgtcactgagctttgaatgggtttcaaacttgcggaggatccattccaccgctccggtaggaaggcatgtcagcacaatcttaatcaggcttatgacaacaattgaaacaactgcaatccatgtcaccttacatcatctccatacttgttctacatgaatcttaacatagaaggaaacattgttttttgtacattatgtgaaacttgatatatgttcaaaaaaaatccggatcacataggtgatccggatttttcaagtctgcttctgatcgtcaaggcggacggcctctctcagctcttccgcgacaaattcgacgttcggcccgataatgacctgcgccgttttattccccgttttgataaccccttttgctcccgcttttttaagcgccgcctcattaatgagagacgtatcctgcacggtcagcctgaggcgggtcgcacagtgatcaatcgtttcgagattttgcctgccgccgagccccttgagcatggcatgttcttcgacggaaccggccgtatcttcactaagcacttcttcctcttcctcatcatcttcccgtcccggcgttttcaagtttaacgttttgatgagcatataaaagacggcaaaatagatcaccgcataacaaagcccgacaacgagcagcaaaagcggtttttcggcaatgccgtagctgaggagataatcgatcgcccccgccgagaatgaaaaacctgacctgattccgagaacattcacgataaataaagagaacccggttaatatagcatgaaccccgtacaaaagcggtgataaaaacataaatgcaaattcaatcggctctgtaattccggtaataaatgccgtcagcgcgagaccgatcatcattccggccgtcgctttgcgcttacttggcttagccgcggcaatcattgccagacaagcggccggaagcccgaacatcataatcgggaagaatcccgtcatataagtccccgccgtcggatccttcgcaaagaagcgggccagatctcccgtttttccgtgaaaatcgccaaactggaaccaaaaaatattattcaacacatgatgaagaccgaatggaatcaaaagccgattaaaaatcccgtaaatccccgcgccgatcccgccaagcccgatcatccattccccgaaggacgtaatcaccgactgaatcggcggccacacaaatccgaagatacccgccaaaataatggtaatcagcgccgttacaatcggaacgagcctgcgcccgctgaaaaacccgagatattcgggcagcttcgtatccttaaagcgattatacgtgtatcccgcaattaaccccgcgataatccctccgaaaacggccatattatttgtcgaattgattgattttacagccgcgtccagcatgatataagaaatggctcccgacagagcggcggccccgttgctgtctttcgaaatcccgatcgcgattccgatcgcgaaaatcagcggcagatgatcaaataccgcggtccccgccgcgtaaatgaacggaatatttaataagtcctctctgccgatggccaaaataataccaacggcgggcagaacggcaatcggaagcataaaagactttccgagtttttgcaaaaattgaagcattttacccatcccccttcttttttcttaaatataccacataagttatctagtgatctataccaattttccttcatttattcacataaggcttgttggttttctatttataaaccagttgtggtaagcttgaatcagatgattaaaaatagaaagcgggaatgacaatgattgtaacgaacgatcaagaattagaaggccttaaaaaaatcggcagaatcgtcgcgctggcgcgtgaagaaatgaagaaaaaagccgagcccggcatgagcacgaaagatcttgacctgatcggaaaggcggtgcttgacgagcacggagccgcttccgctccggagaaggaatacgatttcccgggcgtgacatgcatcagcgtaaatgacgaagtcgctcacggcattccgagcgcctctaaaatcttaaaagccggagatcttgtcaatatcgatatttcggcggagttcggcggtttttattccgatacgggcatttcatttgtgctcggagaaggcgatgaacgtctgcaaaagctttgtaactgcgcggcatccgcatttcagaaaggattggatcaggcaaaagccggcaaacgtcaaaaccagatcggcagagccgtctaccatgaagcccgctccaacggatttaccgtcattaaaacgctgacgggccacggaatcggcagaaacctccatgaagcgccgaaccacatcatgaattactacgatccgtttgataacgcgctgtttaaaaacggaaccgtgatcgcgcttgagccgtttatttccacgaaagcggaaacgattgttgaagcgggagacggctggacatataaaacgccggataaaagccttgtcgcccaagtggaacacaccatcgtgattacaaaagacaaaccgattattttaactgcattgtaatgtttcatctccctcccgaacaggtatacaacaactaacccgaaggagggagacgcatgaaaaaagataaagaaaaaatcaaaattgaaaacgaaatacacgccatgcacggcgtaacgaaacagcagattttagaggatttcgaggaatttaaggcgtaccttcatcagaaaatttccgccggaaaaaaactgggtctggatgacagcaaaatcatcaaaagcgccgccatcctcggggactatctcgccaaacacgaggagccccgcaatgcggaagaaaaactcttacaagaactgtgggacatcgcggatgataatgaaaaacagcatttggcccagcttctcgtcaaacttgccggacactgatacagtgcccggcttttttatgctccgttataagagttgtgctacactggacatatgtctgtgaaaggagccatttttcaacatgtggtttattatcttcgggtttattttctttattgaaagcatcattctcaccgtttacggggtgaagaaaaagaaggggatgctgatttatttcggcgtcgttttcggaatcatgacactcggaacggtgctgttaaaattaaccggccattaagcatgaaaagaccgccctttacatatatatgtaagaaagctttacatctctgaatcgaaaggctcagtttttgcattatcccttttcagcgtctttttatagatgttacaatgccaaaagtttggcaaaaactgaagaaacctccccagcgggagaacggagaaaggagttttctgacatgcattatggcagtaaaggctggtatgtagaagagttaaagaaaaaaggaattacccactatgaaggaagaaagcttcaaagcttcaaaaagtacttccttgccaatctgctggaaacaaagaaacaagcataacgtaaatcagccgtgctgtcagtgcagcacggctttttttctatacattagtgagcctgtccctttttttaaggaaggactccctccagctttctgacagcgcttcttcccgcagtatttcttcaatcgctgacagattgtctgaatcacggtatttcacttcgttcgcataccagacggaaatgctttctttgcctctcgacagacgcttgaggacgggacgcggatcgacatatccttcttcaagcaccctgaaataaaagccggtaaatcccgtctgctgtacacggagcaccatatctttgatgccatatttgagcgcgagtttgacgcagggctggcgcggctggcttacttgaacgacggcttcacccagctgaaagatgtcgccgatccacacgtcttgttcggccagtcctttgaccgttacattctctccgaacgcggcggcgggaagttttctcgcgagcgttgtttcccaatatgaataatgctcggcgggatacacgcacaccgctttatcgggacctccgtgatgcttcagatcagcctgcccgtccccgtcaaaatgggttttatacagcatgacgggagaatctgcgggccgcttgatgatgcctgaattgatttgtctgccggcaaattcatgaattgcgggctttccgagattgatagataagacagaatagtcttgcgtcatctcgttcacatcctttgcgaaatatcctacctttcctttatcatagtaagaaaaaggtggtttttccatgcttcagtatcatatgattgcagacggccgggttcagggcgtaggttttcgctacttcgtccagatggaagccgacagacataagatagccggctgggtaaaaaaccgtgatgacggccgggtggaaatccttgccgaaggccctgaagagtcgttaaaacaatttgccgaagcggtcagaaaaggcagccccttctcaaatgtcacaaacgtaaccatcgaagaatcacaccgtctgaaagggtaccgcaccttttccatcagttactgataaggcttgtcctgataaaaataattcggcttcacaatcgtattgtcatatgatttatggaaaatgtgggtggaagccggcgagatcggcggaatcagccaggtccagtcgcccgtcagctttctgcccgcgtcttgttcctgttcttcaaagcgtttaaattgattcgcggccgtatggtgatcgacaatgctgacaccgtgttttttgtatgaatagagcactgccttattcagttccaccagcacctgatctttccacaggtcggtattcaggctggcggaaatccccatgaccgaagcggcttttttgagcatatcataccgcttttcgtcagcaaggttccttgcgccgatttcagttcccatataccatccgttaaaaggcgccgcgttgtacgacagtccgccgatttcaagcctcatatcggcgataatcggaaccccgtaccacctgagatttaaatcggcaaactcttcaatatccggatgggtgatcggcacttctttcacgagcgtctgaggcaggtcataccagaccggctgcccgtcccctttcatccggaaaagcagcggcagaatatcaaattcggtccgcttcccgcgccagccgagtttttcgcagacagccgtcagctcatatgatgccggatcaccgactcttcctttttcagtctcatatcccgcatagcggatgagctggtgattccagatttccacttgtttctccccgttcttctcaggagggaaaatcgtaatcgtcggtttaatttttccgccgttcgtggcgatttcaatatgttcaaataatgcgtcacgcacctcttctttcgtgttcacattgcgccggtcaatgacgttcagcgattgccagaacagacgcccgatacagcggttgctgttgcgccacgccattttcgccccgtgttcaagctcttccgccgtatggacgtaacttcccgtccgatctatctcatcttttatcgcgtgcagtcgcgcgttgatttgcgattccattccgagttcgtgatagcagacatcaataaaatccttcgcctcatcccaaagtatttccgtatgtttcaaaaaactctctccttcaatttacatctgtttcccattgtatcgtttttaggtgtgaacacaatggtttttttgtatcatactggaaactgcgaagaaaaaacacctgtgattttcgcaggtgttttacaaaacggaatgcagtttttcagccagtgtaagcaaatcctcacggtagttttttcccgtcatcggaattccgtgacccgtcaaaagcgcttccggctccagttccgccaatttctgaacggatgcggccgccgtctgcgtatccgctgtaaaataggcgggcggaccgtgaagctcttgcttttgaatgacaacgtccgcaagcgattcctgttcaacagtgatcacggcatcaccggcaagcagcacgcggtctttatcccggaataatgaaatatggccgggtgtgtgaccgggcgtatgcacccatttccattcttcaagaaacggaacggtaccgtctgaaggcagtgcctgaacggacggaatgcggatcgtatggcgcggaaacagcggtgacagctttgcgacaagcccttttttcgcatcgggcctggcaggcggataatccgctttccccgtgacgtacggaagctccttttcatgaatgtaaaccggcacattccaaagctcaagcagttcttcaatcgcaccgacatgatcaaaatgaccgtgtgtcaaaatgaccgccttcagctcatacccctctttgaaccggcgtttcatttcatttgtaatcatctccgacgattgaggcattcccgcgtcaaccagaatgatttcccgcggagctgagggattttcgataaagtaaacattcgcaatctgcacggtcagtccgtaaacgccgtccgccgctttaaaaccggcgccgcttctcactgaaaaaagcggcataaacggatcactcatcatggcacctcctctgatgcctttagtgtgcgacgaaccgggtgttttatgttaaaaaatcgtgattgcgccgatgatgagcgcaaaggccgtcatgacgataacggcaagaaccgcccatttcatcgcaaatttctgatgttcatcaatggtgaccccggcaagcccgactaataaatgcgtcgacggcacgagcgggcttaacatatgaatcggctggccgataatcgaagcgcgggcgatttccaccttatctacaccgtacgccacggcagtctcagataaaatgggcagcacgccgtaaaaataggcgtcattaggcatcagaaacgtaaagataccgctcgttaaggcaacaatcgccggaataaaacctcccatctgttccggaataagcgatacgagggaaatggccatttcatcaaccatcttcgtccccgttaaaattccggtaaacacgcctgcggcaaaaatcatcgaaccgatcgcaagcacattgctcgaatgggctgaaatgcgctccctttgatcattaagtttcggatagttgacaatcagcgcgatacaaaacgcaatgatgaacagcacggttaaattcacttttcctgacactaaaaatcccactaaagaaagcgttaacagtaaattgaaccaccacagtttcggccgcttccattcatcttccgcagccgcagccgtttcatttgtatgggacggctgctttaattcgatcaccccgagccgtttcctttccatccttccgagtacataagcgaccacaatcatacacaccattccgctcgcgatgacaggcagcatcggccccgtcagctctgccggatcaacgccgagcgcactcgccgcacgcggcgccgcgccgccccatggaatcgtgttcatgatacccatgccgaccccggcgattcccgctaaaataatcggacggattccgagcatgatatacaaaggcagcattgcgcttgtcgtaatcatatacgtcgtcgagccgtctccgtccagtgcgacaagcatggtcaaaacggctgttccgactacaattttgagcgggtcgcctttaaccagctttaaaatacgcgacaccatcggatcaaataaaccggtatcaatcataatgccgaaataaagaatcgcaaacataatcatcactgcgatcggcgccacctgttcaataccggagatcatcatctcgccgacccggttaaaagaaaacccggcaatcagcgcaaacacgatcggcgttaatacgagcgccgttaacactgaaagccgttttgtcataatcagcaccataaaaacaagcatcataagaaagcctaagattgctaacacagtatgtcccctcatcatgaatacgcttacattttaaaggcccgatcccctttatccgcctttttgctatcttatgagaattggatattgaagtaaatattttggattttaaagatttttaattttttataaccttttcgttcattttgttcatttataaatcaaaagccttccgcaaatatgcggaaggcttatttttcgctgctcatcatctctttataaaactcggtctgctcttctaaaaagcgttttgcgccgctgctgtttttataaaagctctcccaatcccgttttttcaacatttgcttccactccgcggatgaagtaatctgtttcaaagcctgatcccaataggcgatctcgccttcggtcatgtctttcggccccatgatgcctctccagtgcgcaaagacaaacggcaccccctgctctttccatgtcggcacatcgctgaagccggagagccttttgtcagacgtaacggccgccaatgtgattttccctttccgataggcgtctctcgcttctgaaatggtcattgaggcggcgtctatctcgtgactgataagagcttcaatgacttcattgctgcttccgtattgaaaaaagcggatatcaaacggagaaattccggccatttccgccgctctcgcaaaggagagctggtcatcatttccgaggccgggcgcaaatccgatttttatgccgcccggatttgctttaatatcgccgagcagccgctttccgctttttatctttgaatccttcggaagagcgacggtctgccactcttttgcgataatggccaaaggcgtaaaatcagctgccttcagccggctttgtcccaaaatttcattgcttaacagcagacttgaattcatactgatgacatccgtttttcgttcgtttacatatttccagccgctgtctccgcctcctccgggtttatagatgatctttacgggccggcctaatatttgcttccgctctattaccgattgcaaagcttttgccgttacgtcccagcccccttgaggcgctgccgggacgactatttcaaccggcccttcagctgaacggatgcccgccgcctgccgtccgtcaaaagaaaccagcgccgccagcatgacaagaagcactcccaaccgcttcatttctcccatcccttactcatgtgctaaataatatttccgttccggcctgccgataatgccgtactctaattcagcgagcgcttcttcccgagaaacgagaaactcggcgtagcgccgcgccgttgttctggaggcacccattttttctcccagttcttcagccgtcatccctttttgggccgttctgagcgcgtttttgattttttgaagcgtaatcgaattaatcccggtcggcagatcattgtgctgtttttgttctttctgaccgcttccgaaaaacatgtcaatcacggactggctcagctccggctgtgagtgcagccattctcttttttcacggtactgcaaaagcacttctgtaaatttatgtgccgacaccggttttatgacataatgggcaacgcctgatctgagcgcttcctgcagcagccttgtttcggcagaagccgtaataatgatgatatcaacggaaggaaaacggccgcggataagcgggagcagatctgttcccagctcatccggcatataaatatccaatagcagcagatcaggctgccgtttctcaagcagcgatatggtgtctttggcattgattgctttgccgatgacattgaatccatcaagatgttcgataaatttttcgtgaatttgcgctattcgaaagtcgtcctctgcaatcgcgatgttaatcacaccgattccccctttggcctttctttcggtataaacaccgtaaatacggcaccgccgctcttttgctgcgaaatctcaatcgctccctgcaactcactgacggcttctttcagattggctaagccgtatcctctccttgtcccctttgaagagtagcccttttcaaatatcgtttctgttttttcctgaggcacgccgtctcctgaatccgccacttcgatgacgatatccctgccgatatcggtcataaaaaaggatacctcttttttctctttttcggcgacggcttcgaaagcgttatcaataagatttccgatgatcgtaatgagctgggatgaacccacatgctccggcagcgattctaaaaagctgttttcatctattgaaagcttcactttcttctcagacgcctttcccatttttcctaatagtatggcctgaacccgctgtgaatgaatgttttgaaagaggatttcgtgctgttcattctggatggcgtactcttcttttatcagttcaatggcttcattatattctcccagctctaacagaccgagtatcgcgtaaagcttattcgagaattcatgcgtttgcgcccggagatcctccgagtattttttcatttcagtcagcttgttaatcagtttcttgagctccgttttttcgcggaagctgatcaccgctccgtatacttgtccgttctgcttcatttctttcacgtttaagataaatactttatctccggcacgcacctccacgttcggcggtaattctccccctgccaacaccggcatgagctttgcgcccggcatgatttcttttatatgccttccgatcatcggttccggaagattcagcatatcagccgcagataaattcatcatggttaccgcgccttctttgtttacggcgataatcccttctttcatcgcaaggagcatcgcattgcgttccctgtacagcgctgcaatttcatgcggttcaaggccgagtgtatctttacggatgctttttgcgagcgccgccgctcccccgatgccgataagaaacaccaaacatgcaaaatagcctaaatgccgcaaatgcgccttcatatctttttctatctcatcttgtagaaattcgactgtcaccgttccgacgacttcgttatgatttttttcctccaaaataaccggggcgcttccccggacggccttcattccgtcggaaaccggagacccgccgaacatgacggttttattttgcagattttgattttctttcggaatactgcttcgggccgaatgaaatgcaacatgccctttttgatcagtgatgtagacggcgtgcgcgcctgcctgttctttcatttgttcaatgacgtctaactttgtaaaagcctcttgatccgcaagccggaacgcctcttttacgggaggcatatatgaaatggtttttgccgtttgcaccgccagctgttcagcctgcttctgcccttcctttaattgctgaaaggcaaatataaccgtgagcgttccgatgacaagtattaataaagccgtaattaatccggcgattttcatttgcagagagacataaaaccgcttcgcttccaacacagcaccagccgtcctttcctcctaaaatcataccattttttaaatcttcatttctcatttttgagaattttcgcgatctttttctcttgtcatttctttcaaaaagtgcagtctggtataatttccctcaagagagataagaaggatgaactttttataatcgctgcgcaaaaaaagactgacaggagccagtctcgggatgtttcacaacggacgtatattcagttgacaaagtgtttctctatgatggctgagatacatttgaatgaccggaaatatcaatcaattttcctttgacggccaggcgtccttcggttcttaccgccttgtcgcatgtgattaatgtaatctctttatcttttgtctcctgaattgcgtttgcttctatttctgaaatcatggtttttgatgttacagaataaatatagtcttttctaaagtcggtaatcacgatttgcgcacctttttttatgtgtaaaagagggccgaacaataggttctcctgcttcagatggtggcctgccaacgggtagtttccctcgcccattttctgatccggacgcatagttgccgcgccgatcagcaggttttcattggttgtgccttttaaaatcggaaggtctaaatcgatgctgctgatggttatccgtccgattatcggtttcggtttgcgattaaaacttgactgaactgtttccctgaaaccgggcggatgaatggattcaaattcatagtccgcttttttcatgttatttttccgcgcttgttctgcggtcaattccgattcaatttggcttttactgaggtacgcaatcaaacagcctttcatgagaggagaggaaatgagaagcagcccggacaaaataagaacggcaatgatcatttttttaaccatgaagaaaattcctttcttgtacgtcatgcggtgagtatttggtgagaaatgattctctttttaaaaaagcacctgatcgattcttacatgatcaggtgcgattacgtctatctattccttgctttcttctttcttgatacaacagccgcggctccgccggctaatagcagcagaataccggccgtgaccggcatcataccgtccgtatcaccggttttcggcagatttttgcctgtatccgggtgattggttttactattggtatcagggtgatgcccgccttgattcgtttgatgattcggtgtgtctttcccaggtgcgggattttttaatttcttattagaaacgacgacctcaacagcttttgattgtcctttttcaattgtgaattcaattggtttttcgttcagctgatagccgtcaggcgcttttgtttcgataaatcgatactgcccgggcgctaatcctttcaccgtaaaccggcccttttgatccgtcttccataccgccggccgttctttgctgccgccggtgtttaccggatgtccggcagaatccgttatcttgaattcagcaccttccagcaccttatttttatcgtcatgatccacttttgtcagtgttacatcacccggcgtcagtgtattctccgcactgatttcgactggttttatgtcggtatttgtgatcttgaatgaaattggcgtttgatccaaactgtaaagttcaggcgcttttgtttcgataaattgatattcgcctgctttcagtccccgtacaacaatctgtccgtgctcatctgtcgtcagaccttctctcagcactttgccgtttgcatctgtcagattaaacttcgcaccttgcaggactttccgtttgtcaccttgatccaattttgtaagaacaacactgttcttgatgttaactgcagtcagggcagcctgatccggttttccgctgttctcagccttaatcgtaaaccgcacaggggttgttgacagcagataaccatccggcgcttttgtttcaacaaattgatagtttccgggcgccaaaccgccggcgtcaattttgccgccttcttttgtcatcagatcttctcttacggtttttccatcactgtcaatgattttaaatactgcaccgtctaaaacgtttccgtcttgatccttcttaaccagctggacagagcctttatagttgacaaaggtgccggtctcagacggcttcggctttccttccgctgtttctgagatggtaaactcttttttctccgtatttaacacataaccgtcaggcgctttcgtttcaatgaatgcgtaatgaccgggtgcaaggccggatgtttctacttttccgtctttatctgaaaccagatcgtcctgaaccgtttttccatcacggtcgacgattttgaagactgcaccttcaaggtttcggccttccgcatcttccttcgtcagccggacagagcctttatagttgacggccgttcctgcgtcagttgactccggctttccttccgctgtttctgagatggtaaactccactttcttcgtatttaacacatagccgtcaggcgctttcgtttcgatgaaggcgtaatgacccggggcaaggccggatgtttctacttttccgtccttatctgaaaccagatcgtcctgaactatttttccatcactatcgacgattttgaaaactgcaccttcaaggtttcggccttccgcatcttccttcgtcagcaacacagagcctttatagttgacggccgttcctgcgtcagttgactccggctttccttccgctgtttctgagatggtaaactccactttctccgtatttaacacatagccgtcaggcgctttcgtttcgatgaaggcgtaatgacccggggcaaggccggatgtttctacttttccgtccttatctgaaaccagatcgtcctgaactatttttccatcactatcgacgattttgaaaactgcgccttcaaggttcccgccgtctgcatctttcttcgttaaagcggcttttcctttataattcaccattgatcccaattcaacatcaggtacttgattcttttcgttctttgcgattgagaagtgaatggcttttgtgtttacgataaaccctgatggggctttcgtctccatcagccggtagtatccggcgggcaaaccgttgatctcaactttcccatttttatcgctttcaatattattttttatcagagtataggtaccgtcgcttgattttttctcaagcttaaatacagcaccggccaaaggattattgttttcgtcttttttgataagcgtcaccttatttttttgatttatgactttatagagtgctcctgctgcggaggatttgccgtcaatcgtaacggagaccccgtttacataagcatcgctgatggtgtagccgtccggcgcttttatttctttcagtacataggttccgtaacggatattcccaaacgtaagtttaccggcatcgtctgttgtgcccgtacgcagcagctgcttgccgtctttagaccataattgaaagtctgctcctgaaagagatgttccgtctgatcctgttttagatatcgtcaggcttcccttctcccctgaccctgagccgccgccgcttgaaatagcgacaaacactgagctgttgttctcttgggtctgctcctcaacattcgtccctgatatcgacactttgttgttgacctgaccgctgctgccggaaatattaatgagagaacgatattgtatgacatacgcacggtcgatttgtttatagccgcctgtaaaggtaagggcaaatgattgttcaccggtggcattgtcagttttcatatctaatttatagtccttatctttctcaagctgcacatcacccggaataagatttccgctgctgtctttcataacgccgttctcattatattttgcttgatatactttaaaagaatcttcatctattatttgattctcatccggtgtgtctttgacttttacgtcatccagtgtcgattggctggcattgacattgatgttccaatcgatattgtttccgttctgtttgccgcctttagaaatcaggtttcctccgtttgcgacggaaactgaacccgtcagcgttcggtctgcatggtcattattaaagtactctgctttgtttgtgtattgattctgtttaatgacctggccttttaatgacgttttaaattcaatcaggtatggtacagcgtcatctgttttgagatgtacggttaacgtatttttgttgccgtctgacggctcttctatttcatattttgaaggatccagcgcctctccttcagtgatggagccgtttttgctgatggtatacgttttaacagcaaccgacccatgcaaaaattgctgaccatctgtgatcgtatcttttatataaggatgttttgaaggttcgccattgtaattgatgccgactttccatgtgatttcttttgaaacggcgttgtatgagccgtttttgaatccgttatgggacgtctgattgttcggtgtgaagccgctcgattccttatttgtgcgtttgttgccgtttttatcggtccatgtcgactccgccgtatttttaatcgtttcgtttgaaaagtcagcgttgaattttgtcttatacgtgatcttaaactgactgtttgtttctgcgtagtccccgatcaatgctattgtaaagccttgatttccgggtttttttgttaatgtataatccgttccttctttcagcgttttgttttcagtcgtgtcttgcatgttaaatgaatcgtcaatgagcgccaggcctccgctggtgaattgatcatccagcgtccagtctttcattgtgtaaccgtttttgttaactgtgattgtccaatcaaccgtcttcttctcatagtctgcgtttgaataatgtttgatcagattctgctgaatggcggttcccggagtttcctttgagtcccccgtatctgtcattgctgtattggtgtatttgacaggactgtcaataatgaccccatcgttgacttgagattgataaatgatcttatatgctcctgtgacagtttgcttgaattttatttcaaagccgttcccgttatcagtcagcgtataatcatcaccctcttttaatggggcgccctcttgttcgctgccgttctggctgaatgtaatcggaaggactttcaatgatccgggaactagatgcagatcgtctgatccgaacgtatccttaatgccggctttggattgatcaatctttttctcaccgtagttgtacataacagcccagctgaacgtttgggtttctcctttataacctgtcgaagatttttctatcatttttccgtaacccgctgttacggaagcttccgcagaaatcggctccgcattgtctccgctgaatgccgccttgtttgtcagcgtgatgtttccgcctttacccggctttgcctcatctttaatttccgtgtcatatatgagccggtaggctgaatcaattgtcccggcgaaggtgacattaccgttttcgccaacggtataacctgaagttatctcatttccctgactcaccgagccgtcaatattcacatcaagttcatacactttcacagagcggaaagtcaattcgtccggaaggctttcagtcaatttcgcatttttaacttcttcttcctttttattaaggtcaaccgtccacgttacctttccgggattaatgcctttatccaatgaccctgatttctcaatggttttattgacattcggtttaaaataaaccgttacgtccggcgtatcagagttaaccggaaacttaatcttttgtgtggttgatccttttatttctttctgattgaattgggtgtttacatacaatgaccccttgacgttagaatcttcttttacctcgccgttaaacgtcatgatgacatggccgctcgtattaatggaaaaagttccgtacgtactatcgccgtcggtcaatggctggttcgtaatgtcattatgcataataaattctttaggcaggtcaaattcatatcgatcaccgtcgtttattgttttccccagctcattcggaatcgcccattggatggtgatattcgccggagagttcgtattcgcagggttgtttttgtcatatggttttcctttttcatccgtcaatttcacatcagttaaaatattttgcgtaatccggtttccgcctgattgaaggcttttagcggcagatttgcttgtaatcaccatttttgattgactgcgtttagcagaaggttttgatttcgttgcctgttctgctttatccccgccgtctgcagatgctgattttttctctgtcttatcctgaggttcagcaggtgttgaagaggtgtttttttctgtatcggaatccgttgttccgtctttcttcacaggtattaacacttgctgggtcttgccggcatccagttgaaaaagagcttttgccattttcgtctcatctgttatgtcgggagtaaacttcgccgacagtgtaatggagcctttggcatccccggcatccgcttcagcatcgttcactttcacttccagcgtgcttctgtttgcttcagctttatatataccgatcacccgatcagctgatttcagctcaccttcggcatcattatctaatgtaaaactttccggaatctttacggtgatattccggtcacttgcatcttctttgtgttttagtgaccattcgtatgtcagtgtcactttatctcccggtgttaaagccggttcaccggcttttgatccgtcaacggtctgctgtctgccgtctttgactgcaactgaatcaaagaacccgctctcgctatgttgtgatccggaagcggctgcgatcggagtaaagctgacaacttggctgaagatgaaaaacagcgtgaagcatgaaatcaatgccgccctcagccttttgctttttttcgggctgaacgaaaagttcctcactcccaatgtcttattcctccccttttatatagacttacgttcgaacaagccggtaagcatgggattctccttatccgaaccaaactacattgtatgaaatcggcctatacaaattctgtacatgggatcatttcagaaatagcgcacaaaaaaagaccggcatcagccggtccggtcattcaatcgtcaattgattttatcttttaattgtttatatcgttcgtattcctttatcgcctcttctacctttcccagtttattaaataactgcagtttgtattgtataattttatcgtcaccgggctctattttctcaacctgcaggcaaacgtccatcgcttgacgatcgttcttctcttggatgagaaaaccaatcagttcgtacgctttgctgagccacagatgggcaagacgcgctttttccggctctgcccacagatagccattctccatgagataatggttctcatatgacatgaccatgttcatgtgccgggttagtgcagctgcgctgagcggaggagcctctttgaatgttttttcccattcaactgtatcaatctttaccccggaaagccggagaatgtatcctatatcagtattttctattgattggctgaagggcagcttaccgattaatttccgtatctgatatattgtcgagtagagctgggtgcttgcttttgatatatcataagcaggccaaaacatctccattagcatgtctttactgaccgtgcgcccttgattaagaagtaaaaatgcatacagttcacgggctttggatgttctccacttgactgttatgtatgttttgacaccatttaccgattgataaaagtccaggttcccaaaacattgtataacataatccgtcccggtattcccgtccgccgacctgagttttttattcattcggatccgctcaacagttgtcagcagccgggcattgtcaaccggttttaatagataatcgacagcattcaattcaaacgctttgatcgcgaattcattataagcggtgataaaaataacttggatattttcattgacctcctgaatcgattcagcaagctcaataccgtttatcccgggcatttcaatgtcaagaaacaccgcatcagctgctgaaagttccgaatgctccagaacttccgccggatcttgaaacgttataatagattgaaaggcgtttgtccgctcaagcatacgattaaaatgaagcaatgccagttcctcatcatccacaattaacgctttcaaaccgcatcccacccgtcaatatagatatatctgaaaataatttcaattataccatgcccaatgccctatatagttggattctttttctttctcttgttgtattataacgtttgtgattacaatatttatacattaaataggataatagaatgcccctgaatgggataaaggagtaatgatgtgaaagaaaaatttatttcgattacgattatttgcggctatgctgctttctttatgatttttatggccatggatcatttttcaggatcatccctccctcaagcggaacagggcgtgatcaatctggaaaattgggattttcaaaaggatggaaatgtccagctgaacgggaaatggattctatatccaaatcagatgctgtcaccgcaggcgcttcattcagcaaaaggaaaaaatcccgtactcgttgatgtccctgtcaatgtgaagctgttcggaaaaacggccgacgtggattacggaacgtacaaactgacaatccgatcaaatgaagacaatcaggttttggggatcagcacatcttatatctacagttcaaaccgcctttatcttaatggaaaagtaatcggacagagcggcaatccttcagaaaaagctgattttaaggcgcagaacaaaccgtacagcagctttttcaggcttcgcaagggtgacaatgaacttgtcctgcatttttcgaatttcggaaaagttcccggctgggggatcgcaaaaccgataacgtttgggactcaagaacaaattatacgcgagaatcaaatttccttttttaatgattccattatgattacggcttttttcattaccggtttatattttctcggcttttttctgcaacggacaaaggataaacatttattgttcttttccgtgatgtgtctgcttttttcagccattattcttatgatcgggaaagaaagaattatctttctcctctttccgtctatttcattttcattgctgaattccttgcgtatcatctcaaccgtgcttgtcagcatggcggtttttctttatctcttttatgcatacagagaaattgtttcaaaaacgacgatcaccattttaaccgctttatccgggatcatcttgatcactgattttatgtccggaagtttcattgatcacctctcatacattttacattctgtgctggccgttacgactctgttttatattacatatatttttacgattgccgccataagaaaaataaaaggaagcacgtaccttacactcgcatccgtctcgatgagcgcttttgtgattcttacgaccatttcagcttacagcggcaaaacagctttttcttttaattcgatctattcattgccgacagtcatcgctttattggcggtggttctcctgatggcgcagcaattcgccggagctttccgggacaatgaagtcctctcacggaaattagtcaaaatggaccaactgaaagatgaatttatcgccaaaacttcacacgaattcaagacgccgctgaacagcattattaatatatgccaaacccttgtagccggcagaaaaaagaagacgatagaggaagagaaagaaaatatgcagctgatcatccgtatgggctacagactttccgatctcgtaaatgatattcttgatttggaaaaaatgaagcaggggatgctgcagattcgtccggttcccgtcgatgtgcatgccgtcatatgcagtgagatgaacttctaccggcttttatccaaacataaaaaactcgcgattcttaatcatgtgccggacgatctccctttggtgcttgcagatgaaaaccgattccggcaaatcttaaccaatcttattgaaaatgcaatcaagtacacatccgaggggaacattattctttccgccgcaaacctgaatgacaaaatgattcaaataaccgtgaccgattccggcagcggcattcctgaggctgatcttgaaaccatttttgattcttttcagcaagcgggagggaaggaagaagatggaacgggtttaggtttaagtattgtgaaacagctcgtcaagctccaaaacggggacatctgggcggagtcagcggcggcgcaaggatcagcctttcattttacgttacccgccgctcaaattgtttctttaccggaagcaaagaccgaacttcctaaatcacagcccggacagagaataccggatatttcgttggtcacgccttatcactcagagaaaatcgatgctccgacgattctgattgtcgacgataatatcgagagtttgaaaattttaattgatatgctggaaggtgttccttataacgtaatcgcagtaaaaagcggaaaagaggcgcttcaagctgtctcttcctcgaagcttgacttggtcatattagacttgatgatgcctgacatgacgggttttgaagtctgcacaaacatccgcgaaaggttcagcatggtcgatctgccggttcttatcgttacggcagccattatcagccatgacaaatacaaggcgtttcatgccggagcaaacgacattttacaaaagccttatcattactctgaattcaccgcgcgtattaaaaatttaattttaatgaagcatacggctcaccaagccacaaatttagaaatggcatttcttcagtcgcagattaagcctcattttctttacaatgtattaaatacgattatcgcgctcagccatttggatattgaaaaagcaagggaaaccactgctgcatttacaaactatttaaggatgagttttgattttcaaaacacttcggacatcagctcattcagaaacgaactttctatcattacgtcatatctttctatagaaaaaacacgcttcggcaaacggcttgatatcctttttgatattgaacaggacattgacttcccccttccgcctttaatgatacagccattggtggaaaacgccgttcatcacgggatcagtaagaaaagaggcggcggacggataaagctgacagcgaaaaaacaaggcgaaaacacgtatcttatcaaagtggaggataatggaaccggcatcatgccggacatacagaaagatattttgtcttctgatgttaatcgcagtgtcggcctgaaaaatatcaatcggcggctgaagcatttttgcggaagcgaattgacgatcaccagcaccccggatgagggcaccgctgtttcgatgatgattcacactcccggcacaacggatgattcgaactcactgaaaacgtcttcattaagatactgattaacttcaaaaggcatgtaaatacttctgccgactgtcgggaaattcccgtcagcctttacagaaagacgtaaaaacaaaaaagcttgaagaaaaaatgatatcttctccaagcttagcttagatgatccgcaccagtctggccgttctcacttaagaaatcgtaacccccgcgcttgcatatcccgccactgtattaataagcgaaaggcctgtcgcagtggcagagaataccattaacagccgggtttgaggagttaccgcaatgttcagccctgtcgtgattccgttgctgatgctgccgattgacaatacgccggtgaggggaggagctaaagtgacggatgctccggggatcggcgtgaacgtattgttcggcacagtagaactgtatagttgtgcggttatcgtaacagtcgagccgacaagcgacaatgctgcggttgtactgaaataggcggcaattgatgtaatggttccgcttctcggagcagaaaaagcaaagttcagcagagttcctccagccccggtaagatcaattgcacctccccctccgacattgacgcccgtcacagaattgccgaacccgacaaggctcaccgttccgattaatccgccggcaatggtcgtcacggcagtgggaagacctgaagcgtaaggaatgatcgcgcctgctccggtgatcccggtggcgcctgttgctccagtagcgcctgttactccggttactccggtgatcccggtggcgcctgttgctccagtagccccggttgctccggttgctcccgttactccggtcgatccggttaccccagttactccagtcgctccggtgatcccagttactccagtcgctccggtgatcccagttgcacctgttattcctgtcgctcctgttactccggtagcgcctgttaccccggtagctcccgttattcctgtcgctcctgttactcccgttactcccgttactcctgttactcctgttactcccgttactccggtcgatccggttaccccagttactccagtcgctccggtgatcccagtggctcctgtagcgccagtatccccggttactccggttgcgcctgttactccggtcactccggttaccccagttactccagtagccccggttgcccccgttactccagtcgctccggttgcccccgttactccagtcgctccggttaccccggtggctcccgttactcctgtcgctcctgttatcccagtggctccagttatcccagtggctccagtagccccggtggctcctgttactccggttaccccagttactccggtagctccggtgatcccagtggctcccgttactccaatcgctccggttacgcctgttaccccggtggctcctgttattcctgtcgctcccgttactccggtcgtgcccgttatcccggtagctccagtatccccggttactccagtggctcccgttactccaatcgctccggttacgcctgttaccccggtggctcctgttattcctgtcgctcccgttactcctgtcgctccggttaccccggtagcgcctgttatcccggtggctcccgttactcccgtggcgccgggatctccagtgactccagtggcaccggttaccccagtcgctccggtattcccggtcgagcccgttgctccggtcagtcctgttgctccagtgaaccccgttgctccagtcagccctgttgctccagtgaaccccgttgctccagtcagccctgttgctccagtgaaccccgttgctccagtcagccctgttgctccggtcagtcctgttgctccggtcagtcctgttgctccggtcagtcctgttgctccggtgcaccccgttgctccggtgaatcctcttacgtgaaaatgatttggatgacagcatggacaccatctttcatgacagcaagggggttcgcaacagaatccttcacagcaatgtgcccgattttgataactgcgcctttgatttcttcttttatgttgaaaatgacagcaacactcattacaatttcggcagtcgtaatcccaagaatcgtatctgttataccaagtatctccttttctcattacaccacctctattttcataatatttccacagagaaaaaaggtgtggcaaaaccccacttctattgggcaatttttcaaatgttcgttaagactgcatcatgcacagcattttacagaaaaaagacctaactgtgcataagtcaggtctttcatctttaaaatatcagtctgctgttgtattaggttgtcggaaaacttatgctgttaaaatcgatattgagtgcagttgctgtcgttaaattattagcagttgtgaaaataaccctgagctggtaagtgttcgttcctgcggtcggcgcagtatccactgttgtatcagcaatcgaaaaactatccgtagctgcgagagtactggttcgcgacagagttcttgtatgaatttgcactgctcccctatataatctcacttcaaaaacaaagtttgaattcgctgcagttgttaacgcggcactgagtgcataatccagctttacattctgcaaagcattaactgggattgccagcgtagcaacgggaacttctgtatttaacggcggataaacagtgagcggcccgttggttcttgtgaagagcaaggttggtgtactgcctgtggcgccggttggtccggttgggcccgttactccagttgggccagtcaccccggttactccggttgatcccgttactcctgttactcccgttgctcctgttactccggttgctcccgttactcccgttactccggttgctcctgttactcccgttactccggttgctcctgttactcccgttgctccagttgctccagttgctcctgtcacacccgttgctccagtcacacccgttggaccggttgggcctgttactccggttgcacccgttactcctgttactccagttactcctgttactccagttgctccagtggctcctgttgctccagtcacacccgttgctccagttacacccgttgctccagttacacccgttgctccagttacacccgttgctccagttacacccgttgctccagttacacccgttgctccagttacacccgttgctccagttacacccgttgctccagttacacccgttgctccagttacacccgttgctccagttacacccgttgctccagttacacccgttgctccagtcacacccgttggaccggttgggcctgttactcccgttgctccagttagtcctgttacacctgttggacccgtttctccggttgaacctgttactcctgttgcgccagtcgctccggttatccccgttgccccagtcactccagtggctcctgttgatcccgttactcctgtggctcctgttggacccgtgattcctgttgggccagtttctccagtggcccctgttactcctgttggacccgtttctccggttgaacctgttactcctgttgcgccagtcgctccggttatccccgttgccccagtcactccagtggctcctgttgatcccgttactcctgtggctccagtcacacccgttgctccagtcacacccgttgaaccggtttctccggttgagccagtaacccctgttgatccagtcacaccggttacaccagttgagcccgttgctccggtttctcctgttggtccagtcacaccggttgggcccgtcgcgcctgttgctccggttatccccgttgctccagtcactcctgttgcaccggtttctcccgttgtcccagttaccccggttggaccggtcgctccagttacccccgttgccccagttgctccggttgggccagttgctccggttgggccagtcgctccggtttctcctgtcgcccctgttactcctgtcgcccctgttactccggttgagcctgttgatccggttacaccagttaccccagtcgatcctgttgctcctgtggctccagtcacacccgttgaaccggtttctcctgttggtccagtcacaccggttgggcccgtcgcgcctgttgctcctgttatccccgttgctccagtcactccagttgcaccggtttctcccgttgtcccagttactccggttgatcccgtggttccggtttctcctgttacacctgttgggcctgttactcccgtcgctcctgtttcaccagttgggccggttgagccagttacaccggttattcctgttgaccctgttacaccggtcgctccggtttctcctattgaaccagttgatccggttgctccagttactcccgttgaaccagttgatccggttggaccggtcgctccagttacccccgttgccccagttgctcctgtcactcccgttgaaccagttgctcctgtcactcccgttgaaccagttgctcctgtcactcccgttgaaccagttgagcctgttgctccggttacaccagttaccccagtcgatcctgttgctccggtttctccagttattcccgttgcgccggtcgccccggatgcacccgttgcgccagttgagccggtttctcccgttgctccagtcacacccgttggaccggttgcgccagtcgatccagttgcaccggtttctcctgttgagccagtcgcgccagttggacccgttactccggttgcgccggttgagccagtcgcgccagttggacccgttactccggttgcgccggttgagccagttgagccagttgagccagttgagccagttgcaccggttgagccagttggtccgatttctccagttacccccgttgcccctgttgcgccggtttctcctgtcgctcctgttactccagttgagcccgtggttccggttgctcctgttgatcctgttaaacctgttggccctgttgcgccggttgggcctgtcgatcctgtggcgcctgtttctccagttaatcccgtcgcaccagttgagccggttactcccgttaccccagtcgctcctgtcgatcccgttacaccagttagacccgttactccggtggggccggttgctcccgttaccccagtcgctcctgtcgatcccgttacaccagttagacccgttactccggtggggccggttgctcccgttaccccagtcgctcctgtcgatcccgttacaccagttagacccgttactccggtggctcctgttgctccagtcactccggttggtcccgttgctcctgttaaaccagttgaacctgttcccccggttgcgcctgtttctccagttattcccgtcgcaccagttgagccggttgagccggctgctcctgtcggtccggttgggcccgttcccccggttacacccgttaccccagtcgctccggttatccccgttgtcccagtcactcctgttggacccgttacacccgttaggcctgttgtacctgttactccagttgacccggttgctcctgttgatcccgttactccggttgcacctgttgctccggttgggccagttgatccggttgctccggtttctccagttattcccgttgcaccggttgagccggtttctcccgttgagccagtcggtccggttattcctgttgacccagttacaccggtcgctccagttactccagttgagcccgtggctccggtttctcctgttgagccagtaacccctgttggtccagtcacaccggttgggctcgtcgcacctgttgctcctgttatccccgttgctccagtcactccagttgcaccggtttctcccgttgtcccagttactccggtttctcctgttacacctgttgggccggttggaccggttggaccggtcgatccggttattccagttgaaccagttactcccgtggctccggttggtcccgtttctcccgttgcaccggttactcctgttgtcccagttaccccagtcgctcctgtcgatcccgttgcaccggttgaacctgttactcctgttgatccggttactcccgtcaccccggttgttcctgttgaaccagtttctccggttgaacccgttgctccgattggaccggtctctccagttacccccgttgcccctgttgggccggttactccagtagctccggtatccccggtcgagccagtttccccggttgctccagttactccagttgcaccggtttctcccgttggacctgttactccggttgagccggttatccccgtcgcaccggtggctcctgttgctccagtcactccggttggtcccgttgctcctgttaaaccagttgaacctgttcccccggttgcgcctgtttctccagttattcccgtcgcaccagttgagccggttgagccggctgctcctgtcggtccggttgggcccgttcccccagttacacccgttgcccctgttgcgccggttgggccgcttggtccggttgggccggtcgatcccgttacccctgttactccggtcgctcctgttactcccgttacaccggttgggccggttgagccagttactcctgttgggccagtttctcccgttgcaccggttgatcctgttactcccgttacacccgtttcaccagttgggcctgttacccccgttgctccggttgggccggttgttcccgttcccccggttataccagttaccccagtcgctcccgttgcaccggtttctccggttgagcctggcgatccagttggaccgatctctcccgtgggtccagttgatcctgctgcaccagtaactccagttgaacctgtcgacccggttggaccggttggaccggttgatcccgttgctcctgttactcccgttgctcctgttgaaccagttgaacctgttcccccggttgcgccggtttctcctgtcggtccggttgggcccgttccccagttacacccgttgcccctgttactccggtcgctcctgttactcccgttacaccggttgggccggttgagccagttactcctgttgggccagtttctcccgttgcaccggttgatcctgttactcctgttgatccggttactcccgtcgccccggtttctccggttgaaccagttgggcctgttacaccagtcgctccggtttctcctgttgcaccagttactccagtagctccagttactccagtagctccagtatccccggtcgagccagttgggccggtttctcctgtcgaccctgttcccccggttggacctgtcgaccctgttcccccggttggacctgtcgaccctgttcccccggttggacctgtcgaccctgttcccccggttggacctgttattccggttgggccggttgggccggttgatcccgttgctcctgttactccagttgagcctgatgagccagtcgcgcctgtttctcctgttactcccgttgcaccggttgcaccggtttctcccgttgagcccgtcggtccggttgaacccgttgcccctgttattccggttgaacctgtagatccagttggaccggtctctccagttgcgccgatttctccagttacacccattgcccctgttgggccggttgggccggttgagcctgtagatcccgttacccctgttactccggtcgctcccgttacacccgttgcccctgttgggccggttactccagtagctcccgttgcaccggtttctccggttgagcctggcgatcccgttggaccgatctctcccgtgggtccagttgatcctgctgcaccagtaactccagttgaacctgtcgaccctgttggcccggttggaccggttgatcccgttgctcctgttgaaccagttgaacctgttcccccggttgcgccggtttctccagttaatcccgtcgcaccagttgagccggttgatcctgtcggtccggttggtcccgttaccccggtcgatccggttatccccgttgtcccagttactcctgttggacccgttacacccgttaggcctgttgtacctgttactccagttgacccggttgctcctgttgatcccgttactccggttgggccggttgctcctgttgagccagtcgcgcctgttgatccggttgaacctgtcactcccgttgaaccagttgagcctgttgatccggttacaccagttaacccagtcgatcctgttgctccggtttctcccgttgtcccagttactccagttgggcccgtttctcccgttgatcctgttactccagttgatcccgttgcgccagtcgatccggttactcccgtcgctccagtttctcctgttgaaccagttacaccagttgcaccggtttctcctgttgaaccagttacaccagttgagccggtttctccggttgagcctgttgcaccagtcactcctgttgggccagtttctccggttgcgccagtaactcctattggaccggttgagccggttggaccggttgagccagtcgcgcctgtttcccccgttggacctgttactccggttgagccggttatccccgtcgccccggttgctcctgtcgatcccgtgaccccgatcgggccagtcacaccagtttctccggttgaacctgttggtcccgttcccccagttacacccgttgcccctgttgggccggttgggccggttgggcctgtcgatcccgttacccctgttactccggtcgctcctgttactcccgttacaccggttgagccagttactcctgttgaaccagtttctcccgttgcaccggttgatcctgttaccccagtcgagcctgtcgatcccgttgcaccggttaatcctgttactcctgttgatccggttactcccgtcgccccggtttctccggtttcaccagttgggccggttgttcccgttatgccagtcgagcctgttgctcctgttactccagttggaccggttgttcctgttgggcctgttgctccagttactcccgttgaaccagttgctccggttggaccggtttctcctgtcgcccctgttactccggttgggccggtttctcctgtcgatccagttggacctgttataccggtcgcgccggttatccccgttgctccggatgggcctgttgctcctgttatccccgttgctccagttgggccggttgttcccgttcccccagttacacccgttaccccagtcgctccggttgaaccggttgaaccagttgctcccgttactccagtcactccggttgagcccgtggttccggtcgctcctgttacaccagtcgagccggttgctccagttactcctgtcggaccagttactccgtttggaccggttacacccgtcgctcctcttgccccggttgcaccagttactcccgtcgctcctcttgcgccggtcactcctgttgggcccgtcactccagtgggacctgtaattcctgttacgccaggttcacccccggtttgcgccaatgaaacatcgtctattaaaaccgtgccggaagaaactttacttaatacaatgacggcagaggccgcgccagaaggcacactgcttgttttatagatttcagaccatgtgtgaaagagcacgttcggcaaatttccgggtgtaatattttcttgaatggaactgatttgttcacctgctgcgctgacatagatgatctggagagtgacttggggacttggatcatttccgagcgttgcgagtgatacgaatagagtcactgacttggctgaaatgggaacgatttgactgaggtaagcatatggctgagctccaataaattgcgcagaatatctccctgaatgtgcaaacaaactgttaatctgggtatttgccgaactccaccccgctaatgtgccggtttcaaagcttccgtttataatcggattattcattcaatctttttccctctccttcccgttgttgaccgtcttacttattaagacagcatattaatacgggctgtgttttgacaacctaaataaaaaaggtgatttcttttcatcaccttaatccgatccttgaatggggaatcccgtcgcaatgagggagcggtttgctgctgcgacttgtgttacgtagttcgaagaaaggacggataaatagagctgatacgcggctgtttcatccgccttcatttcgtcgatgtacgtaaaaggaattcctatgatttgtccgcctgaagaaaagaggttccgctcttgtctctgtgtttgtatcgttacgccatttctttgcagctcgacagctaagaccaatgagaaatgagacgcaagcggatctaattccacatttacttgtatgacggcatccgttttcaccaattgatctgtcggcgcagctatcactgcgcttaacacgtttatcggtgttccttctaacggaagcgtcattaggtctgctgtattttgaaaagctaccgcaggaaccgctcccggcggcccctcaggccccgggggaccgggcggaccgggcggacccggcggacccgcctccccttgcggaccgcgggagccggcgggtcctcttttgccttcgggacctcgcagcccgggtacgcacaaggcagatcgattttcatttgaagacggaaaccgtttttccgtccctgtttccggactttcaagttcacatggtaattgttcataccggcgtttcatatgtctgctcatatatttgtaaggtttctgtttcaatatcatgtattgattacggccgctgctcataatatcaccccggcaatattctattcgcactgaagtcagcgtgtgcaggcccttcccattccttacagaaataaaaaaaaggcagacctgagtctgccttttttcttctaccataaccctaatactttccaccataatccgccgatcacaagccatgtcacaatatggacgattgacaggataaagccgatggaccaccatttgctttgcgagatataacccgctccgaaaaagaccggagccgctcctgagccgtaatgcgtcgtcgaaccgaaaaggttgctgaaaaacgccaggctgagcgccgccaacagcggcggagcgcctgccgccacgatgacggcgagaaatgccgcatacatggcgctgatatgcgcggttgcgctcgcaaagaagtaatgcgtgtaataatacacgacaatcagaatcataaatgccacaatccatgaaaaaccggaaacagatgatttcatcatattgctgaaccaagacaccatgccgagctcattcaggaaattcgccagcatcacaagcgccgcgaaccaagtcagcgtatcccatgcaccttgttcttttttgatgtcctcccatgttaatacctgtgacaaaagcaaaacggataatccgatcagggccgtcgtcgttgcgtcgatatttaagcttcctccgaaaatccacagcgcaagcaccaataaaaagacgataaccatggagagttcggattttttaaacggacccatttctttcaatttttccgttgcgattttagccgcgtccggtgtttctttaatttccggcggatacagcttataaatgacgagcggcgtaatgattaagctcgccaatcccggtacaatggccgcgattgcccagcttgtccatgtgatgtccacccctgcgacatcgtgggccagcttggcgatcagcggattcgccgccattgccgtcaaaaacatcgcagacgtaatcaagtttccttgaaaaccggtttttaataagaaagcgccgattttccgctctgttccgtctgccggcgttgatccgaaagtttcggataatgatctgataataggaaaaataatgccgcccgcccgtgccgtgttgctcggaatggcaggtgataaaattaaatcactgaacagcagtgaataagaaaggccgagtgttttcttcccgaaccgttgtacgaatacgtaagaaatcctggcgccaagcccggttttgataaatccccgggaaataaaaaaggcgatgacaatcagccagattgtcttgtttccaaatccgcttaacgtattttcaatagatagcgttcccgttaacgcggtgactgccaatgcaaaaattgcaattgcgcccattggcaagggcttggagataaagccgataattgttgcgacaaaaatagcgaacaaatgccatgctttaggttcaagtccggacggcgcgggaataaaccaaatgattaatcccacagcaacagtaataagcaaaggaatgatttttactgcctgctgtttttttgcgtctttttctgaagccattacaggtctcctcctattttgttgtcttccatccccctatcccattttactacttaactaagttaataaacgtttttgttaattaaaaaacacaaaggaatattttcctttgtgcttcttgtttattattttaatatacccgacccggctttagatataacatctgattttacatttgatgatgagccgatggaaccgtgcaatgacggtgtccagccgacggactgacttaatccgttggcagctgacgcgttaattgcggcgccgtttaaaagagtgccgtcttcatgaagtgcttttccgccgctgaagacgctgatgactttatcagcagccagtcccggcacttcaaagacattattctgggcatatatttttgacgcgtggcctgcgccccacgcatagctgaacgggtatgcggcgcttttagagcctgcgtaaaaattattataaatatgaacctgcccgtaccggacccgcggtgcgcgctggacgatgttctggtaatagttatggtgaatggtcaccttcagttttccttcatccgacgtcttgctgtcgctgtttccgatgacggagcctttgtcatggtcatgatatttattataggacaatgtaatataattcgccccgttggctatatccgtctggccgtcatggtgctgatattttctcccgtaatagtagggaaaaccgctgtcgggattcgatccgtcattaaaggtgcaatgatcgatccagatatgcgtcgcgccgttaatggtgatattgtcatattccgagttccagttgccgctgctgccgtccgtcgggtcccattgcggaaaatagtcgtaagcgtcttgaaattcaatgttgcggatgatgacattgtcgacgccgttctttatattaaaacttccgcctgtcactttggcatttgaacccgaaccgatgatcgtcgtatttgaaggaatgtcaatcacgacccgtgctttctggtttttttgagatcgctgtctggcgtcttcctgggtgcctgacggcgcttttttcccccatttgtccgggtcgtacgccttcagataagcgttgagatcatatgccggatctttataatcattaaagccgagcgttttattccggtcgtccgtattcatattgattgtgccttgtatgtaaataatcttcggcgtgctgttggcgcttccccctaatgcagaaacgagctgctgtctgtttgatacggtgtagacattcgataaagaggctttcgcgccgccggttgtcccgccggaagcggctccccagccgtcatttgttcctaacgtctgccgtcccaggtcagcggcatagacgtccgcagggatcatacataaacaaaccgccagcataagtaacatttttttcatgaattgtgctcctcctgattctctgttccaatttattacaattggattgtatcaaatcagttgagaaacggcaccgaaaatgtacagcatgtgcctttcggttttattgcggaaaccgcaaaaaaatcccaagggaccgaaaaccccttgggatctgttcagcttacgcccatgattttactttttcgttatccgtgacaaacagaagaacttttccttcatctaagcgcttttcaaattgtgatgcttcctcttctgaaaagccgatttcgtgaattttgttgcggagctcgtcgccttttttattaaacatattgccgaccgcgtgtttaatgcccgtttctttcgctccgatggtattgacatcagtattatccgccagacggtccgttctgtcgtcatcatgtgaaagcacatatacgtcttcttttgcgacacccaattgctgaagctcttttacgtcctgcatcagtttttgatcatttgtatattctcttactaccggtttcattgataagtcctcccttttgtttttgtatattggatgtttacccgctcaaccaaaggtcaaacaaaagaaagagagttccgggaaaaaacgggcagattgtcggtggatattttccggcgggacatgttacagtagggaaagtaacttttatcagaaaaataaaaatcttcatgagccgattaagcagggaggtggttcctattcattacttttcaccggaacagcgatttaacgcttgggttgtcagtgatttagtgaagcaggtattccgccggcatacccgctgcccggatggaataaaagagcttacggcctttgctgaagatacttttcatattaatatcgatttcgttttctctatcattatcaatatcggtgatatcgaatccgttctgccgacagaaattgaaaataagctgggttcttatctgaccgcgcttcagcccgtgattacctctgacatgcttcattcttcaaaaacgaatgcctatgaatatttggaacatgagaaaaacaccgatgtgtaccggttattcttttaaatacgcatataagaaaagaagggccctggcccttctttttttgttgccggcggacggtttgattttgtattcgggaaatggttcgtgttacatttggaacaaccacttatcttgaaggaggattcagtatgccgaataatcagcagcagattcaattggcaagacgcccgaaaggcgttcccgtccatgacgatttccgctttgaaacgattgccgttcccgaaccgaaagacggcgaagtgcttgtgaaaacgagttatgtgtccgttgatccgtacatgcgcggacggatgcaggatacaaaatcatatgtagagccgttcgctttagatgaagccataacaggcggagtgattgccgaagttctgacagacggcgataagctgaaaaaaggagatgttgtgatcggaaatctcgcatggcaggaatattcagccgtcaatgagtccgccctccgcaagttggatacggatatcgcacccgcccaggcgtatctcggcattttagggatgaccggactgaccgcttacttcggcctgcttgatatcgggcgtccgaaaaaaggcgaaaccgtcgtcgtttcaggggctgcaggcgccgtcggctcaacggtcgggcagattgccaaaatcaaaggcgcgcgggttgtcggcatcgccggttctgacgaaaaaatcgcgtatcttaaagaggagcttcaatttgatgaagccattaattacaaaacggcggatgatattcaaaaagcgcttgaacaggcatgccctgacggcgtcgatgtctattttgacaatgtcggcggaccgatttcagatgcggtgataaacctgctgaatgaattcgcccgcattccggtatgcggagcgatctcttcatataataccgaaagtgaagaggaagacatgggcccccgcgtccagccgaagctgatcaaaacaaaagcgctgatgcaggggttcatcgtcagtgattatgctgaccgcttttccgaaggcgcgaaacaattggccgaatggctcaaggacgggaagcttcattatgaagaaacgattacggaaggattcagccatattcctgacgcgttcctcggtttgtttaaaggagaaaacaaaggcaaacagatcatcaaagtcagtgatctaggttaacatgatgatgaaaaaaggagggctttgtcccctccttttctgctttttcgcatcagccgcgaagaatcaaagtaagaaagccgtcttcatcaggctccgtattttccaaagtgaatcccgctgcttgaaagcagactaaactgatttgattgtctttttagatgcttgccgcccattcccgcacgccggtaaacccaggatcagtcagcagtttttgcaagatctgttttccgtacccttgaagctggtacaaaggattgacgatcaatccgatatacgcccgttcctccacaaactctatagagaccattcctgccggaagctgcccgtcatatgccataatgacagtatcgtcttcatctttactcaatcgtgcataccatgcatttagtggccgcatcgcatccattctccgtctgatattatcgttcttaaaccagtgttcaagtattttcagctcacgtaccttcaatatttgaaatcggtctattgaaaccatcttcccgcccccgcctgaaccttttctattatttcacaataaaaaagaagggcttcccgccctccgtttcttatttctcagataattttccgcctgaataaacggcctctttcagctcaattccgagtgatttggccatttttttcaatttggattcttccatcggcgtgacaaggctgagtacggttccttctttaccggcccgccccgtccggccggatctgtggatatatccgtcttcattcgggatgtctgcgtgaatgacgtacggaagatcatcgatatcaagtccgcgcgccgctatgtcagtcgccagaagcagcggaaattctcccccttcaaacgctgataatatctttgcccgctccatttttttcgcttctccgtgcaggatgccgagatccacgtgatgataggcgagtttttccgcatagacgcttaaatttccgatatctctgacaaacacgagcgcctgcatgccgttcagccgtgacagcttttgcaatagcttcactttatcccgctgatcgcagacgagatattgatgcgtgacgcgcgctttttccgccgtattccgcgccactttcaaaacggccggttcatgtgcgatggcattcagcacctcttctgtctccggctgcagcgtagcggaaaagcttaaaagctgtcggtctttcagcgtcgttttaatgatttttttcatcgtttcgcggtgttcctttgtcacgagctgatccgcttcatcaagaacgatcgtcttgacttcatgcattttcagctttttcgcctgaatcaattcgagcaccctgcccggtgtgcctgcaatgatatgcggtttatttttgagcttctccacctgctttttcacgtttgccccgccgatcaaagacaaagcgcgaagatcggagccttttttccactcctgaatcacttgaaaaatctgcatcacaagctcgcgggacggcgctaaaatgatcacttgcggatgtttctgttccgggttgatccgctccagaaccggaagcgtgtacgccaatgtttttcccgttcccgtcggggattcggcaatgacgtctttcccttccatgatcacctgagcggctttttcctgaataacggtcggctcctgaaagcctgacgcctcccagttttcggcgataaatggttgtgtatgctgtaaaaatggccatgtttgggtcatgtcgttctcctcaattcttaaaatctactccatagtatctcaaatgcacgcggcaaacgcaattttctttttccttccaagccttttaacaaacggtctcctcctttataatcataaatgagaaagacacatgataaaaaaagcgtgtctgataacgatagaggtgtaatgatgagtattttatccgtaaaagatttaagccacggcttcggtgaccgtgcgctttttaacaatgtatcgttccgtcttttaaaaggggaacacgtcggcttaatcggagcaaacggcgaaggtaaatcaacgtttatgaatattattaccggaaagcttgagcctgatgagggtaaggttgaatgggcgaaaaacgtgcgtgtcggctatctcgatcagcataccgtgcttgaaaaaggaaaaacgatccgcgacgtgctgaaggatgcgttccattacttatttgcgatggaagaagaaatgaacgagatttacaacaaaatgggcgaagcggaccctgatgagcttgagcagctgcttgaagatgtcggtgtcattcaggacgccctgacaaacaatgatttctacgtgattgacagcaaagttgaagaaatcgcccgcggcctcggcctgcaggaagtcggcctagaccgcgacgtcactgacttaagcggcggacagcggacgaaagtgctgctcgccaaactgcttttggaaaagccggaaattcttctgttggacgaaccgacgaactaccttgatgaacagcatattgaatggctgaaacgctatttgcaggaatatgaaaatgcgttcatcttaatttctcacgacattccgtttttaaacagcgtaatcaatttgatttatcatgtggaaaaccaagagctgacgcgttatgtcggtgattatcatcagtttatggaagtctacgaagtgaaaaaacagcagctcgaagccgcctacaaaaaacagcagcaggaagtggctgagctgaaagatttcgtcgcccgcaacaaagcccgcgtcagcacgagaaatatggcgatgtcccgtcagaaaaagcttgataagatggatatgatcgaactggcggccgaaaaaccgaaaccggaattccatttcaagcctgcgagaacgtcaggcaagctcatttttgaaacgaaggacttagtcatcggttacgatactccgctgtcacgcccgctcaatctcagaatggagcgcggacagaaagtcgccctgtacggcgcaaacggcatcgggaaaacgacgctgttaaaaagcctgctcggtgaaatccagccgctggaaggcacggtggagcgcggcgagcatcaatacacgggctatttcgagcaggaagtgaaagaaaccaataacaatacgtgcatcgaagaagtgtggagcgaatttccttcctttacccaatacgaaatccgcgccgccctcgccaaatgcggcctgacgaccaaacacattgaaagccgcgtctccgttctcagcggaggagaaaaagcgaaggtcagactgtgcaagctgatcaattcagaaacaaacctgctcgtgcttgacgaaccgacaaaccacctggatgtcgatgcgaaagaagagctgaaacgcgcgctgaaagaatacaaaggctccattctgctgatttcccacgaacccgagttctacatggatatcgcgacggaaacatggaattgtgaatcttggacgacgaaagtgctgtaaacacaaaaaggaactcccgcccgtgcggaagttcctttttttaatgtccggcttttattccggcaagatgtttgcgtcccataagaagaacaagcatgccgacaaaaacgacaatcccgcctactgtatatggtgtgcttgcggtgaagtgttctgacagcattcccgcaatccacggagcgagcgcaccgccgataaagcggactgagctgtaggctgaagacgcgatggaacgttcaaccggcgcagcacccatcacagcggttgtcatgatcgtattcaccataccgaggacagcaccggcaacaacgatacatgtaatgatcaacgtctgatggtcagtccagacccccataataacgagaatggccgcaaaggcgataaagagaacgacgagcgaacgcactgtgcccagcgctttatgcacgagcggcgccgtaaagactgacgtaattgccagcagaaggccccagccgaagaagacgtatccgagaccgtgttcatctaaatccagaacgaacggagaataagcaagcaaaataaaaaatccaaagttgtataagaatgcagatactgccattgtcaaaaggcctttatatttgagcgccttcatcgcatcaaacacaccgacgcgtttcgccggtttcggcagcttcggcagcatgagtgaaatcgcgcaaagcgctataaacatcaggacagacactccgaagaacggagcgcgccatgaaaggctgcctagctctccgccggcaagcggcccgacagaaattcccagtccgagcgcggcctcatacagaataatagctttggcgctgccgccgacagatacaccgacgatgacggcaagcgcggttgaaataaagagagcattcccaagtccccagccgccgcgatagccgacaagctgagcgattgaacttgagcttccgccgagagcggcaaacacgatgataaaaataagtccgagaagcagcgtccattttgcgccgatccggcttgaaatcgcgccggagaaaaacatcataaaaccggtaacgagcaaataacttgtaaataacagagatacttcactaggtgaagcatgtaattgtgcggcgattgccggaagaattggatcgacaagaccgattcccataaaggaaatcacacaggcaaacgcaaccgcccaaacggctttcggctggctgaataagcctgttttctgttgtgatgatgtatccatttgaccagacctcctgttttatccattaaaagaaacgctatatccatagcgtttacagcaaaatcattcgattgattgaatggcgcggtcagctttttctttcattccgttaaggcgcgttttaaaatgctgaaatgtgctgatcttctcatcaatcatctcaagctggtggttcaaagcgtgctgaatctcttccagcttttctttccgttccttcggatccagtgacaacaagtacccctctttgtttaattccagctgacggctcatctccataaactgctgaagttcctgaagggaaaaaccgagcacttcttttgtgctggtgactttttcgagctcctccatatcatcttcagagtaaagccggacgccgccttctgtccgtttaggagcaggaatcaaaccaatctcctcgtaaaaacgaatggttcgttttgtcaatccgcttcgcttggcaacttgatcaatcttcatccattccaaggtgaatccccctcttgtcgtatctgtttctattatacaccatttgaaccttaacgtaaacgtaaactttttatgccggataaacttggcttggacggaacctttgtctttaaagcgccgggagacatctgtgtaagataaaaaaagccggtatgacccgccatcttctcggggccgtaccggcttttcttaattctcaagttcttcaatcatcagtgacaattcggtccagcgttccatcgccgcttcaagctcttcagccgtttttgcctgttcggccatcagttcttgtatctttccgaaatcacttcccgcttcagcgatttccgcttccagacgctgatgcttttcttcaaggccggcgattttgtcttcgatgccgtcccattcgatctgatccttgtacgaaagctttttgcgctttttcttcggctcttcttccgcctttttctcttcggccggctgttttaccgccgtcttcttctcttttgcttgttccatgtattcactgtatgaaccttggaaacgggaaatgacaccgtgtccttcaaatacgatcaggcggtccacgacgcggtcaaggaaatagcggtcatgggatacggtgatgacgacgcccgggaactgttcgatataatcctcgagcacgcttaatgtttctgtgtccagatcattggtcggttcatctaaaaacagcacattcggctcctgcatcagtacattcagcaagtacagacggcgtttttccccgcctgacagctttctgatatatgtctgctgcatcggacgcgggaacagaaaacgctcaagcatttgttccgcggtgatgacatcgccttccgccgttttgacgatttcggccgtctcttttatatattcaatgactttcatatcgccgttcatttcgctgtgatcctgggtgtagtagccgatccggaccgtctgcccgatggtgatattgccgctgtcaggctgaattctgccggcgaggctgtttaaaagtgtcgttttcccgattccgttcggcccgatgatgccgattcgttccccagggatgacaagctcattaaactggctgatcagcgcttggccgttataggtaatggagacgttatcggcttcgattacttgttttccgagacggtgggaaccgatcgcgaaatcgagtgatccggagactgccggccctttttgctccttgagcgcctccgctctgtccactctcgctttttgtttcgtcgagcgcgctttcgctcctcttctgagccacgccaattcgcggcgcaggaggttttggcgttttgtttctttctgctctgccagcgcctcccgttcggcccgtttttccaggaatacttcatagtttcctttatacgtataaaggctgcctctctcaagctcgtaaattctgttcgtcaccctgttcagaaaatatctgtcgtgcgtgacaagcataacggcgcccggatattgcgataagtagccttccagccattcaatcgtttcattgtccaagtggtttgtcggttcatccaaaatgagcaggtcagccggctggatgacgtttttcgcaatcgcgacgcgctttctctggccgccggacagctcgctgacatccttcatcagatcggtgacgccaagtttggttaaaaccgttttggctaacgtattcgcctcccacgcatcattcgcgtccattcgggcctgcgcatcaagcaggtgtttctgacgctggtcattttccggttcttcattcagcgcctgaagcgctttttcgtactctctcatcgttctcatgacggctgatccgccggaataaatatgttcaagaacggtttgtccggccggaagctcagggtcctgatgcaagaactcaatatgcacgtttcctgaagccgtaatctcgccttcctccgttgattcaaggccggcaatggttttcagaagcgtagacttccccgttccgttcgggccgattaaaccgattctttcattctcttcaatatgaaaggagatatggtcgaataatgtcttatctccgtatgttttataaaggttttccgcttttatgatgctcatggttcctatcaatcctcacgtaagttcatgtgttcattttaaatcaggcgctgtaataaaactagtaaaaggacagacaaatttcttggaagagatcattttgtccgaagaatgtttccgcctctccttttatacactggaggggaagaggtgatgacatgatcagcgtcagtttgtgcgttatcgtgaaaaatgaagaggaagtgcttgcgggctgtcttgattccgtcaaagacattgcggatgaaattgtgattgctgatacgggctcgaccgaccggacgaaagaaatcgcggcccgttatacggataagatttatgattttgaatggatcgatcactttgccgccgcccgtaattttgtgttttcgaaagcggaaatggattatattctgtggctggacgccgacgatatgctgacggtaaaggaccgtgaaaagctgattgaactgaaggcgtcgctttcaaaagaggtggacgcggtatccatgtattatcacgtcggctttgatgatcggggagaggtcagcttcagataccgccgcaaccgactcgtcaagcgtgaaaaagggttccgctggatcggagccgtgcatgagtatcttgaggtatacggaaacatcatagaaaccgatattgccgtcacacaccggaaatccgaaaaaaagcactcgcctccctcggaccgcaacttgaagatttatgagagaatggcggaaaacagtgaatcgatgacaccgcgcgatttgttttacttcgcgaatgaattaaaggatcacggccagtatcagcgcgccatcacgtattatcaccattttctttccacaaaacagtgctggatcgaagacgagatcagaacgtgccaatatctatccgattgctacagggcggtcggccatgaagaggccgccatgacgtctctcttaaaatcatttctgatcgattgtccgcggccggagttctgctgcaggctcggcgactattttgcggagaaacggcaataccggcagggcgtgttttggtatgagctcgccctatccgccaaaagcagtgatgcaggctttacccagctcgaatattccacctggtacccccatctgcagctctgcgtctgccactggcagctcggcgacagagaaaaagcgaagattcataacgacaaagccgcctcctatcatccgtcacatccgagtgtcctgtataatcaaaacgtgctcggcacataacatcaaaaaaaagagctgccccgtatgaagggcagctcctttttgattacgctgtcggaattcctccgcttacactgtaaatttgggatgtcacatagcttgattcttctgaggccaaaaagacataaattcctgccagctccgccggctgtccggcacgctttaatggaacggccggtgtttccttgccgaatttcggaatgttttctccgggctgtcctcccgaaatctgcagcggtgtccagatcggccccggcgctaccgagttgactctgattcctttattcgccagctgctttcctaggccgacggtaaaaccgataatggcatgtttcgtcgcagcataatccaacagcatcgggcttggattataaccttctacggacgttgtcgtgataatagacgcgccttccggcagatacggaagcgcggctttgacgagccaatacagcgagaatacgttgacttcaaatgtttgatagatttgttctgtagtaagatcgctgatatcatccactgcctgctgtttgccggcgacaagagcgagcgtgtcaagaccgccaagctcttgatacgctttttccgccaattctccgcaaaacgcttcatcgcttaaatctcccggcagcagaacagcttttcttccctctttttcaattaacgctttcacttcttcggcatccggctgttcctcaggcagatagttaatggccacatccgccccttcccgggcataagcaatcgcggcggcccggccgatacctgaatcgccgccggtgacgagggcttttcttcccttcagcttgccggctcctttatagcttgtttcaccgcagtccggcacaggcttcatctctttctgcaaaccgggcggttcttgatattgttttggaaattcatcatgatcatatttcgtcagcgggttgtgcagatttgcatcagacatacaagactctcctttatcattggtgatgtattcgtatgtgtacccctgagcatgacggatcaaacgtgtaagtgcagtttccgattgataagggaaaacaaaaaaggagcccgtaagctcccttttttatgattctccgagcacgttttcagccattttcgctaaatgctgggcgcttcccgaaatctcctgcatcgtggcagaaatttgttctaccgccgccgcttgaccgtccgtgttctggttgatggattcaattgagtcctccagccctttcagcaggctgtgaatttttttcgtaatctggtcaatttggccgacattgtcttttgaatgagtggcaagcttgcggatctcatccgccaccacggaaaagcccttgccggattctcctgctctcgcggcttcaatggccgcattcaaaccgagcagattgctttgatccgagatgcccttgacagtaacggaaatgtcggcgatttctcccgcgctttcactgacttgtttcgcctgagcggaaatcccggtcatctgtgctgagaaaccgctgatggattctgagatatccgcgatcgccgaagcggtctgttccacgacggcggacaggctttcagcgacatcatgaagcttggctgatttttcaaggctcgtgccgagaccgacgccgccgatgacttttccgttttcatcgtgaagcggaatcgctctggcgatcagcggaaatccgaacagctctttcggcaccatgcttgtcttcttctgattcatgcggatcgcgtctgtaatgatgtcccctttttgcagcggatctcccggctttacattaagagaaaacgttttagccggaatattcacgattaatttttctgtatcataaattccgatggtgatgtcatcttggatcaggctgtttaaaaaaggcgcaactttgacaaaagcgtcaagcaggctgtgcgtttgctgctccgtctgtatactcatttctttcactccttcttaatatgggaattggcgtttttcatgctgaaccgaaatccatttcagcgtggtgaattcttcaaggctccattcgccgttcagcctgccgagacctgattgtttctcgccgccgaacgcaacgttcggttcatcattaatggtcgtatcgttgacgtgaatcatgccggtttcgatccgcttagcaaactcaacgccccgctccacgtttgccgtatgcacggctccgcttaaaccgaacggtgtcgcgtttgcgatgcttaccgcttcatcctccgtttcaaacggcatgatgcagacggccggtccgaacagctcctccttcgcgatgctcatctcaggtttcacatcttttaaaatgacaggctcagcgaccgttccgctgaatcggccggacagcaccggaaccgctccctcttctatcgctttttcgacagaccgtctcaggccttccgcctgtctctcattgattaaaggaccgataaccgtatcagggtccatcggatcgccgactttcagcgatgacactttcgcttcgtagagctctgtaaatttgtcataaacagatgtgtgaacgagcacgcggttcgccgacatacagatctggccttgatgcgtaaaccggctgaatacggccgcattgacggcgtattcaagatcagcatcctcaagcacgatcagcgcgctgtttccgccaagctccaacagcggttttttaaagtgtttgaccgcaagctgtccgatatagctgcccactccggttgagcctgtaaatgagattatccgcggcacgggatgctcaacaaagctgtcgccgatctccccgatatccgtcacgatgacattcagcagcccgtccggtacgccggccgcttcaaaaattttcgcgataagcgttccgccgcagatcggcgtttcttcatgaggcttcagcacgacgccgttccccgcgccgagtgccggcgcaacagatttcatcgaaaggaaaaacgggaaattaaacgggctgatcacccctgcgactccggcaggtattctgtacagcctgttttcttttccgtcaatcgtggacgggagaattttcccttccatccgcaccggaaatgttgcggcttcttttatcatatttttgacaagtccgatttcaaactcagccttcagccgtgttccgccaagctcctccatgattaagtaaataatcgcttcttcgtgctcttcaatgaaagaaacggctttttccaaaatggcccgctttttaaaagggtttactttgtcccattcttgtttcgcaagagccgcggcgcgatatgccgcatccacgtcatcaggcgtcgcttttcggaatgaggtgatgactttttgagtataaggatttctgttttccaatacgttccggctgctcccatccctccatcggccgccgataaactgcttatttagttcttcatattgaaacatgtaaacatctccctttcaccgaaacttgaaattagttgatgagtcatcttttgtatcggtcttaaggtgagaaaattgaactatttcacaataaaattccctttccttccgtgcatcgacgctttttagctttgtccttttaaagtggaaaattctttaattgactgcgagaaatttcgacaatataatacaaacgtcagtgtatataatgataagaatattatgaattttcaggaggacccatatgtctttactatttcggaaaaagccgctggccgacttaaaggcccagagcaaacagaccagcctgtcccgctcgttaagcgcttttgacttggttttgctcggaatcggctgtgttgtcggcacggggatttttgtgattaccgggactgtggccgcgacaggcgcaggaccggctttgattctgtcgtttgtgctcgcgggccttgcctgcgcgctcgccgcgttttgttatgcggaattttcttcatccattccgatttcaggcagcgtatatacgtattcatatgttactctcggggagtgtctcgcgtttttaatcggatgggacttaatgcttgaatatgttatcgcgctcgccgccgtcgcaaccggctggtcatcctatttccagtcgcttcttgcaggattcgggctgcatcttccggaggcgctgaccgccgcacccggcagcaaaacgggtgccgtgttcaacctgccggccgttatcattattttggtcattaccgcgattgtttcaaggggcgtgaaagaaagcacccgctttaacaatgtcattgtattgatgaaaattgcgatcattctgctgtttatcgtcgtcggtttcggctacgtgaaaccggaaaactggtcgccgtttatgccgttcggaatgaaaggcgtcatcacgagcgccgcgaccgttttcttcgcgtatctcggatttgatgccgtgtcaaacgcgtcggaagaagtgaaaaacccgcagaaatcaatgcctgtcggaatcatcggcgcgcttgccatctgcaccgttctttacattacggtatcgctcgtcctgacaggaatgctttcgtacaccaagctgaatgtcggagatccggtatctttcgcgctccaatttgtcggccagaacaaaatagcaggcattatttccgtcggcgcgattatcgggattacaacggtcatgctcgctctgctttacgctcaggtgcgcctaacatttgcgatgagcagagacggccttttgccccgcatgttttccaaggttcacccgcgttttaaaacaccgtttcaaaacacatgggtgacggggatcgctgccgccgggatcgcaggttttattgatctgggaaccttggcgcatctcgtcaatatgggaaccttggcggcctttacagtcattgcgatcgccgtcatcgttttaagaaagaaacatccggagatcaaatcttccttccgtgttcctttcgtgccttttgtgccgatcatcagcgcatgcttatgcctgtatctcgcaagcagcctgccgggcgtgacatggctcgcctttgtcatctggatcgccgccgggatcgtggtatatatgatgtattcgagaaaacacagtttgttaaataaataaaaagggaggctcttttttctgtttgagaaagaagagccttttttgcccttgataattcattcaccttatgaataatatggtgtatgcttcgtttacataaaaaggaggagaatcactttggcaattgccgccccgcttaaagaaaaacctgtccatcgtcccgagacaaccatgtattctattttgttcattatcgggatctgtcatctgctgaacgattcactgcaagcggtgattccggcgatgtttccgattttggaacgttccatgaatcttacatttacgcagctcggaattatcgcctttacgctgaatatggtgtcttccgtgatgcagcccgtcatcggctggtatacggataaacgcccgatgccgtatgctttgccgctcggactcaccgcaagcatgctcggcattttaggtctcgcgttcgccccgtcttttctgacgattttatgctgtgtcttttttatcggccttggctccgccgtctttcatcctgaaggatcgcgtgtcgcttacatggccgccggcgaaaagcgcggattggcgcaatcgatttaccaagtcggagggaataccggccaggcgatggcgcccttgattaccgcgctgattctcgttccgctcggtcaattcggctctgtctggtttacgctagtcgccgcaatcgctgtgctgtttctcatttatatcgccaaatggtataaaggccgccttattcatttgcgcgccgcaagtaaaaaatcaccggccgccgctgtgcagaccgtgattacaaaaccgattattcttgcacttatcatgattatcttcttaattttcgcgcgctcctggtatgtgagcgcgatcggcaacttctatacgttctatgcgatgaatgcctatcatgtcagcattcagcaggcacagagctacatcttcgtctttttatttttcggagctgtcggaacgtttctcggcgggccgcttgcagaccgtttcggaaagcggaacgtcatcatcgtttccatgacggcatcggctcccttgacgattttccttccgtttgcgggacctgtcatcgcctatggcgtactggcgctgatcggcgttgttctgatgtccagcttctccgtgacggttgtctacgcgcaggagcttgttcccggcaaaatcggaacgatgtcagggcttacggtcgggctcgccttcggaatgggcgcgatcggagcggttgcgctcggagctcttattgattcagcgggattgacgccgaccatgacagccgtcgcctttctgcccgttttaggtctgctcgcctttgtcctgccgagcgacaaaacattaaaagaatggcattcataaaaaaatccctgccgaaaaggcagggattttatgtttcaaccgtataaaaatgagtgtcaggaaccgcatatttcggaataaacccgtctctgaaatcaggaaacgctttttgaatttcatcaatccatttttttacgtttttgatgtacgggacgtaaatcatactgactgtcgcctcatcatcaatgtgatagtaccagcagagattgaattcgttctccgtgacgagcgtaaagcctgaaaaatgataaaaaatcagcggggtgtcattgacatatacagccccgtcgcgcaggctgacgtcatattgctcaatattccacagcgccgcattcgcgccgatcgactccgtgacatgcacgtgttcaaactgcgcgggccacttttcaacatacctttggtcaccgtatgtctttttttcttcattcatctccaccgtacaataggagatgcaatcctgtctccactgccagaccgcccgatacgcttccccggtattccgcgcgccgacaaacccggtgttgtactgccccgtcagcttgtaataagacgcaaaccgttctgaattgcggtgatccgtcagaaaaagggaagcatccggcttttccgcaaacagctcgcccgcatctgagaagaaaaagagatcggtgtccaaatgggcaaaatattcggcttcatcatactccgtcatcacatggaacagaaaagccggcttcagcgtccagcaatattcatgaaacgtccggccgccctttgcttcaagcagctccgggtcctccatttcatggagctgaaccgctgtgacatgttcccacggcacctgctgaagcagttcgtacgctttctgatcgacacacagcacatacagatgaaaatcccggcaatgctcatggagagaatgaatcatcggcatcagtttaaagatatgcgttctggaaacaatggttgaaaaatgatatttactcaccatatcacatccaatttatttaagatccacatgcagtaaatcagcagtcagcgctttgaacgcccttgcaaagtgcgtgacgcccagctttttttccgcttttgccaaaagctttccgacctccggcagctggaagctgttcgccgtgatccgcgggcttttcgtcttccagtccggatcgaggttgcggtctttaaccgcgtgcagcagttcgagaaaaatgtgcagcaggctttcatatttctcataatcaagcagcacttcgatgtctgccattatgctgttggttaactccgcgtcaaacgggccgttaaacgcgaggtgcacgtcaagcgaatgaatgtcattgtacttgtcgcacatgtacgcgatattcgccctgatgtcatcaacggaagcgcagttgctcggatgctcctgatggacgctcatgatatcgcgccgcagctgaaatctcattcccgactgatgaagcctgatgccgagatcataatcttcaaagccgtatctgacaatgccttcatcaaacaggccgagatctgccacgtgctgcctcttaactgatgaattgttcgtaatgaaaaaacgccatggcagacggtagccgttcaaatcatctccgtatttttccaaaatgcttttcagcacccggataaagtcggtatctaaatcaaagcatcgttcaagaaagcttccgtctctgatgtcactttcatcaaggagcggctctttatcgcccggcagctcttcatacagttcggcgagtttttccttatgctctttttcaaaacggtcataataaaagctgtaaatccgcttccagaacataccgcatacgacaagatcgtcccggttctcatgagccttgatatgcttcgccaccaaatccttttcggcaagcatgtcgctgtcatggaaaatcaaaatatcgcctctggcattgcggaccgcctgattccggccgtaagcgatccctctgttttctttaattctcacaaaaatcagcggaaaattcgcgctgaatgattcaagcatggataaggttccgtcttccgaaccgttgtcagccacaatcacttcgaacggctctgtgcattcctgttcattcagggacagcaggctgttataaagcctctccttggaattatatgcgggaacaatgacgcttgccttcacttttcgttcacttcctgtatatgatcatttatttgttatcatcctcagatgcaaagccgctgaactcggggcagacggcgctgaccgtcccgatcacccgcttcagaatgtcctgataaagctgatggacaaacggcaggtcggtccggtccgtctcatgaatctgccgaatgtcgccggctgtgacgatccggtatccgctgaaatgatagaaaatcagcggatttccgtcttcgagcacaagacgcccgtccttccatgaaaacgtgtggcggccgtaattccaatggccgatattcacgccgggcgtggtgatgtcacacacgttcgggaacagaccggacatgtaatccaagtagccttgatctccgaattttccttcgcccggcgcatttttgcattcttcaaggcagcgttctttccaccatctgagacaatctgtgccggcactgtcggttttgaagctgagaaaaccggaattataccggcctaaaagacgctgcagcatgtcgatttcctgtttttcaaatgagggaatgacgatatcgccccgtgacagaagcaccgaacaatccggctgattgtcaaaaatcgcgcgcggatcagcgaagaaaaacaaatcggcatcaatgtacgtgacacgctctaattccggatgtccgtccagcacgaattcgagaaataccggcttcaccgtccagcagtattcgctctgatccctcgtccgcttcagttcaaggagctcctcattttccagtgcggacacctgaatcaaggtgacattatccggacgcattgcctgaagcacgtcataggtgtcttgatccatacacaaagtaaaaatgggggcgtccgcctgaaccgctttcaatgagccgaacaaagcgatagcctgatacagccttccttttgataaaactgtgcaatatgcgcttgtcacgtctttctctcacctctgtttctgttacttttgaaaaaaggctttataccattcgatcgttttttctaatccttcatcaatggtatgcgcgggcgtccaattcagaagcttcctcgccttttccgctgataaatattggtgcttgatttcgtggcttccctggttaagcactttcggcttgaggtcactgtccatcgccttaagaattttttctacaagttccagcaccgtcagctgaatctcattgctgaagttgaacgcttctcccgcaagattgagctcctccatcttttccgccagcaaaaggtatgcctcgaccgcatcctcgatgtaaaaataatcacggataaatgtgccgtcgctgcggatttccggcgcttcaccgttcagcacgagctgaatcgtctgcggaataatccggttgaagttcaaatctccgccgccgtacaagttgccgcagcgcgtaatacagaccggaagtccgtacgtattaaaatatgtgtggcttaataaatcggcacagctttttgatacgtcatacggatgtttgccctgaagaggcatgttttcatcgtacggcagtgtcggctggtcgccgtacgctttatcactggacgcgacgatcacccgcttgatgagcggatgcctgcggcacgcttcaaggatgttccatgtgccgagaatattggcttcaaatgtggaaatcggattgcggtttgcgacgccgacgattgcctgagcggctaaatgaaagaccgtgtcaatttcatactcgcccagcgcccgctcaatcacatccagatcttcaagcgcgccctgcacgatattcatttgcttcacttgttctccctgatacaggttcgacttgggcacagtgtcacggacaagtcccgtcacattagccccctgatcgatcagttccttcaccaagcagcttcctaaaagacctgtacatcccgtcacaaacacatttttatttttccagaaactcaaacttgatcaccataccttccatacatgttgtccccggtcccacatcttgttaatttccagcagatttttatacgtatcgatcgccgtccagaaaccgtaatgccggtataccgccaattcgccgtcctttgccagctccttcagcggttcttcttcaaacatgacgtccctgtctttcggcagataatcaaataccttcgggctgagcacgaaaaatccgccgttgatgatgccgtcacttgagtttttttcagaaaagcttttcgccataccgtcttcaaccgtcagcgttccgaattgcgaggtcttttctataccggtgacggttgccgcagccccttttgattgatgatagctgatcagatgaaacaggttgatgttcgccagtccgtccccgtacgtcataagaaaggtttcatcaccgatgatgtccttcgcctgtaaaagccgccccgctgtctgcgtgtgttcccccgtgtctaaaaaagtgattttccacggctcggatgttcccaatatccgcacttctccggtagagctgtccagcgtcatgctgtgattcttccagtcataatctaagaaatattccttaatcatctctcctttgaaaccaagaagcaggataaattcgttcacgccatagtattgatagagtttcataatatgccatagaatcggtttgccgcctatcatggcgagcggtttgggacgttcattggtgatttcgctcattctcgttccttttccgccgcagagaatgactgctttcatctctacccctcttctctgtgaatattggattcgaaaccgcccgtataagagaaaccaacccgataatttgtccgattctctaccaccggtttcaaaatctactgtaagatatgagagattggcgccctttgtgaccaaaagctctctcttttttcagattggtgaagatacacacaaaaaaagagcctcacggaaattccgtaaggctctttctattatttattatcctgattcagcttttctttgccgtaatgatatttagacggatcaaccggcgtaaagtcgctcaatttgtggaatctgagcaggtctttgtacatcacgctgtcagacagcttcagctgctctgtgactctggctttcaggtttttcgtttcctgattgcctttcagttctttccctgtcttcgtatcgtatacgacattggagatggaagtatatttcggcgtgacgtaatctccgttgcggaacgtcaccgtatcatcatggtctttcgagaagagatcggtgccgaaattaatatatttcttagaatcgatgccttccaagtgaaggatcgtcggcacaacgtccatttcaccgccgtacgtatggttcaccccgccttttttgccggggatgcgaagcataagcggcacacgctgattctgcgcgttttgataaggcgtaatttctttgccgagaatttctttcatcgcgcggttatggttttcagagattccgtaatggtctccgtaaagcataatcaccgagttgtcatataaaccggatgacttcagatctttaaagaactgttcaagcgcttcgtcaagataacgcgccgtctggaaatagtcatccacagtcgcgtcgcccgttttcgctttttcgatcgttgcgtctttttcatcaagcgtaaacggataatggttcgtcagcgtgagcaaatgcgcgtagaacggctgtttcagcgactgaagcttcggtatagattctttgaagaacggtttatccttcagtcccatattgacaaggttgtcatcagacatatcgtatgtgctggcgtcaaagaatttatcgtagccgatatgtttgtaaatctggtcacggttccagaatgatttgtagtcaccgtgtaaaacggcgcttgtatagccctcactttggtcaaggatggcaggaagcgattgatacgtgttttccccttttgtcacgaaggctgacccttcaggcagtccgaacagactgttatccatcatcagctcggcgtcagatgttttaccttggcccgtttggtggaaaaagttatcaaagtacgtcatgtcctctccgccgcgggcgagtttattcaggaacggcgtaacttctttcccgtcaagtttgtaattgatcaaaaatgattggaagctctccaggtgaatcttaatgatgttcttgcctttggccttgccgaaatactcggcgttcggcttcgcataatgcgacgatgtatagttttcaacgctcgtcaggtcatcactgctggcatatgcccgctgtgattccgtctgcgccgtctgtacgccgtcataaatcgtgtaattataaaggcctaagtattttacaatgtaattgcggtcaaacgttcttgtcagcagctccgggcggtcctcttcggcaatcgccaggttcacgaagaacaacacaatacccgtcacgataattaatgacgtataccgttttttcagcttgaattccttcagctcacgtctccacaccagaagcgcgattaaaataataatatcaacaaagtataaaatatcatggccggacataatgctgaagatgccgtctcccatatttccgacattaccggattgctttaagttcgggaatgtcaagaaatcatcgaagaatcgatagaataggatattggcatacaaaataaacgtcatgatgaaatcaataatcaccatgataatcgctgatttgcggcctttcgcaaacaatgccagtcctaaaaagaaaatggcgcttgagaacggattgatcacaagcagaaactgctgcgtcggacccttcaccccaaggttgaattcagcatgataggctaaatacgttttggcccaaaacaaaataatagccagtacaaaaaaactaagtctgtaagaaaataatttcttcatggcaacctctactttcctaaacactttaaatctgtattcttactttttgcttcaattcctgctttccgagcaaaacgaaagcatcacacagccccataaacacaccattttaaaaaacgatatatttatcattcgtgtcatgcctattgaacatcttatcccgccagccattagacgcaggatatccgttcttcgtttcacatttttttctggcattaaaaggtaccttatcagacccggtctgaaaataggagataccaaatataagaataacacaaacttctaaaaacgaaaaatgaatatcaaagacagccgcccaacaggcgggctgaagttattgtatgcaaagggactgaaaaacttgaaggttttttttgggtgatgtaaaaaaaggaccggagtcatccagtccttttcatcacatcgctcaaatccccgcccaaacatcttttgcgtaaatgccttttgtctggaggtccaaaagccattcttgcgcttgccgttcgtctgtttcgcggaccgactgatacgctttttgcagcgttgcctctacatcgggcgccattttgctgccgtctccgcatacgtagaggcgccctccccggccgaggatggaaattaaagcgccggcgtctttcgccattaagtgctgcacatacgttttcggtacgccttctttgcgggagaaagccgtatgaagcgtcacgattccgtctttttcataagcttcaagctcgtcacggtaaataaaatcatgatcgtttctgcatccgaaatacagatgagcctcccccagctcttttccttctttttttaacgctgcccgagcctgcagaaatccgcggaacggggcgactcctgtgccgggaccgaccataataatcggtttttccggatcttccggcagccggaatcgtgtttccggagtgcggacaaacatcacgataccatcctcagggcggcggtccgctaaataattcgaagcgactccgcgatactcacccaaaccgctccgggcggggccgcgaacgacgccgacggtaattgaggcctgcccgggatgtttccgaggcgaacttgaaatcgaataataccgcggcttcagcgggcgcaaaagctccagaaatcgctcaaacggaagttcacacgcttcatatttttcaaggagatcgagcatcgagacgcgcgatgttaagatttgctcctgatagacgccctcctcaagaaaatcttccaattcccgtttgtgcggcggacagaccgtataagcggccatttcccggatttgagcccttgatgccgcttcctgcaattcgacacagctgctcagaagatcatgcagcctgaccggccgatcgagcgggagatgagccgcgctctgtccgctggccgtcagcagcacttgatcattcccgttcagattgaaccggcggagaacacggctgacctgctttttgctgtttaccggcagcacgccgagatgatccccttcatgataggcagcctctttcggcagagtgatttcgatatgccttgtgctccggccgctttccggcgcctgaagttccctgttttccgcaacggatgcgtaaaccgcttcatacgtctgtgccaacggagacccgccaagcccgctgacaaattgaaggcccagcgcacttcgctctttttcggcattttcattcagcttaagaccgaatgccttcatggcgtccgtccacatgctttttttccattcatcaagctttccttcaaaatccccgctgacgtccccttcgcctcgggcagaaaagcgttccgccctttttcggcaagcttctcatcaatcagtctcggcacagcctgatatgtcgccgcccagttatgatcaccgcagccgaagacggcatatcggacaccttccagctccccgggtttgacttcttcaagccattgaacgaattgtcccgcgttgctcggaggctttccgttataagaggacgtaatgatcaagagagctccttctttcggcagttttccgatccggtcatttaaaggcgccgtttcagtccggacgccgtgcatcccggcagtatcggcaagttcccgcgccacgccttctgcggttcccgtatctgagccgtacaaaatcagaagcggtcggttatcaagcccgataatggatgcgccttttgtttcccgtttttctttttcgacgtcttccgccgctttttcagccgccgggagagctgccgcaacggctcctttgtttctcggccgcacccggatatgaaagtcgccgggcttaatcgtcagtgtctgtttaatatcgagctcataatcggtgtgatcgataaaggtaaaatgctgcagaatcatccccagaacaagagttgcttcatgcagggcgaactgcataccgatacacgccctctgcccgtttccgaaaggcttatacgcatggtgaggcactagatcaggatgttcaaaccgctccggataaaattcctccgcattgtctccccacgcgtctttatcacggtgaagctggggaattaagacggaaattctgtctttcggcgtgatcggatatttcccgccgatcaccgtatcctctttcgcataaaggctgaacgcaggcgcggtcggccataagcgcaatgactcctgcaaaatcattcggatataactaagctccagtacttgtttataagaaggaacgggatcggtcaaaacccgatcggcttcttcataggctttttccaaaacacggggatgtttcagcagaaaatagatggcaaaggaaagcaggccgctggtcgtttcgtggccggcaattaaaaacgtgatgatttgaaaccggatattttcatcatcaagtttttcgcccgtttccgggtcttccacattcagcattctggccagcagatccttttcatcccgtccgcctgaccggcgctctgcgataatactgtctactaacgaaaacatcgcctgaatgtcatgatgaaattggcgcttcgtcctgatcatgagcttatcctgaacatcaaggcgctgcatttggtgcatcgcttcatcaagggcgcgcaccatgctgttgataaacggatgaggcgtttccctgtaatagctgttaaaccgatagttaaagccgcaaagcccgatcgtatcgagcgtcaggcgggtcatatcagcaggcacatcaacggcctcatccgggttcagcctagcccatttttgaatcagctgcaccgcgatatcagtcatcatcgaatgataatctttcatcgcgcgctggctgaaggtcggcatcagaatattatgcgcctttcgccagttaggctcatgcgtccagcttgtaaacagcccgtcaccggcaaacgcccggactttctccaaagcaccttcaatgcttttatcgaaccgctcttcatcacatacctctttcaccagttcatgtccggacacgacgataatggcgcccgccggggtatgcagctgaaaaataggcccctgctcgtttgccagtttgatcagcgacattgtaggcttgtctttatcaagcaaaggaagattgccgagaggaccgaatgtcttcggctgcggaatcggacctgtttccttcatgaataacaccctttcttacacattgatgcgttccttccaactacagtgcccttttcaccggccaattatccgccgttacggatcaatccccggattgacgattgataacggttttttctatactggagaggcttgttaaatacagaaataaggtgagttcacatatggattttgaaatcaagtttttatcgttttatgtcattcaagtggaaggaaaagacgaacaggcaaacaaacagttcaaacatttccagacccttgacacagacgaatttgaagaaagcgagctgaaggattttcttgacggggaattgaagaaaatcgtcaaacggaaagctgaacggcatccgcaatccgagcaggtccccacaaaaatcggccattttatcacggagccgggccatgagcttgattcaaatccgaattacaaccttttcaaccgcgccagacttgcggatacgaaggaagcatttatcgaggcaagcgaacagttcgtccgtacttatcttgacacgagcgccgtgcgcggcggtgtttttatcgtggcttcggccgttccgcgcaaatattttgaggacaaattcgtctttatgatgaaatgcgatttcgagccgaaggtcgcccgcatctcagacgcctcgtctctcattaaaaaggtcgaaatggccatcacgacaaaaaacatgaaaagcattcaatatccgtatatgccggaagaaggcatgacggaagagcatgagctgaaaatccaccaggcctcgcacgcccgttatttcgaagattttctcaaatttgtcgaatatggcgaatcgatgccggaaatcatgaaaaaccaagtcatgaacatggtgcaggagcacgtgtatgaaacttttgaagaaaacagcgaagagcttcagcagtttgagcacgacattgaaatttgggaagcgagtgaaaagcgggaaattcaggagcgcctcgacacccatcaagtcatcgaggcatccgcgcagatcattgaacacacgccggaagccgagctgaaaatgaaagtcggagaaacagagattaaaggattactggctgatttcggcgaatccatccatctcgcaaaagtgaacgggcgctatgtcgcgctcattgaggcggagacgatctcgtttgaaaaaggcagttcgccggtggagtttcacaagcctgaggggctgcatgaggtgattgagcggatacggaataaatctgaacaagactgacaaaagtccagacgccatgttctggactttctgtatttaataaggctctttgagcaatcgatagcattcaccgatgatgtcttggacgccgggcgttccctttatctcgcggcggacgatttcagatgagagattctgcacctgtaatgcccgctccgcccgtctttcgaagtatgcttgacatgcagtttcatggttttcgtgtttttgcagttcttcactaagcacaatcgcgtcttcaatcgccatcgccgctccctgcgccaatgtcggcgctcctgcatggacggcatccccgcccagaacgacgcggcctctgtgccacggttctttgaccgccatctgctcaatcttatgaaacaaaacgggatattcctttgacatattctctgtcacaaacttcactcccggaattccgcgcagcaagtctctcacccgttcaaaacgcgtgtcctcgtcatccctgaagtcagcgtcatacggccggatgataaatacgtatcctgttttttcagagagcggcacgaccccgacctgcgtctgcccctttttatacatcagtgtcgaatcatgaaaaaccggctcgggaaaagaaatgtaaaatctgtgcgctcccatgccgagatactctgttttcacttccctttgcagcatgtgattgcggacagcggagcggatgccgtcaaagccggcgaggatgtcagccgtcatcgcggttccgtctccacaatgcaccgttatttcatctgccgtttcttcgtaagacacgacttttttaccgggcagaatcgtgacccccgccgcctcagcatgcttgctgaggatatcgtttaatgtttgccgcaatatattattccgccccggcaatgaatcatctaaaaacgcctcactcactttaaactgcagcgttccgttttcatcatgctgcttcagccaatccgtttgaaagccgtgttgacagcattcatcatacacaccgatttcccgaagcacccgaagcgcattttgaggctgaagaatgcccgctccgctttttcgcatgtcggacgccgcctcgcaaagggttacttcaaaacccgctctgccgagagaaatcgctgcggacaggccgccgatccctccgcccgctatgatgatctttttcacttcatggttcatcacgataccgccttctcaatttatttatcatttgttaactattagccaccttactatattggctgaaaaactgtcaatctttataggttgccttttgaatccggcaagcttatactttgaatcactaaaatggtacggaggcttacaaaatggaattgagacatttgccggattactcgcagattgccggacgcgctgagatttacgccgatatggatgctgaatcattgaaaacatttttgacgttatttgatatgtctaaaaaaatgaatcaggtcatggagcattatttctcaagtcacggattgtccgaagggaaattcaaaattttaatgtttctgtttgacgaacccggccacagcctgagtccgacggagctggcgaaaaaatccaatgtcaccaaagcgaccatcaccggattgatcgacggactcgcacgggacggctttgtaaaccgcagccggcataccggtgacagacgaaaaatcagcatcgaacttacaagggaaggaaaagaaaagctgatgctgtttcttcccggccacttctccaacatttcaggagtcatggaaagcttcaccgctggagaaaaagcggaattgacaaaaatgcttgaagttttatttgataagcttctgctgttttccggagacagaacataaagtagtattgtaaaaacaaaggcaaatttctatgagatagaaattgaagtaaaaagatgagggttataaaaaaacagcctgcacattagtttgttcaggctgtttcagaagaaataattttaaaattactttctcttcactataaatgcaggtgttttaatgctggaagttacatttgtatatcgatttttagtcttcaacctcactctcacactatttgatcctttttttaacgatttttgatttgagagtttaaatacttttttaggtgttgagtgactgaaagaacctttctttgtttcattagccacccattttgaaccgttccaaacatcaattgtcatggaataatcaaatgttgcgattgtcccgccccatatgatgctacacaatcaatagaagtagcttttgcagaataagaatccgcatcggtacaaactctcaatacatatgttgcataatctgtactacaaggcataatatccttcccctttcaaattttttgaaacaggtttgttattatgacaaaccctccgttcacttctagctggcaaacgtatgacaaagggaatctcatggcttatgagattaaaaattcaaaactcttaaaattaacaaaaggcgcccctcttagcagggcgcctttttcgcgcgattaatcatcactgtttaaaatcccgaaaaaccgaagcaggttgataaacaagttgataaagtcgatataaagcgtcaatgccatcaaaggaatcaggtcagccgtgatgtcccggtgcttgatctggttcagatcgtataagatgtacattgaaaacacaattgttccgatgacggaatacgccatcatggcggcggaattcagcgggctgaaaatattaaatatccccactgcgagaagcgcgataagagcgacaagcaagaaggaccataaaaacgacaagtcctttttcgttttagcgccgatcgtaccgagcaccgcaaaaatgacaaacgaagaaccgaatgcctccaatacgacataggctccggctgcggacgcataatggctgatgatcggaaacagcgtcattccggaaataaaagcgaatgaaaagacaaacacatatccgacggctttttttcggcgcagccaaaatgcggcgatgatcatgacgacctccaagaccgacagcggcagcatcaatgccggcggaatgaactggcccgtatacaggccgattgtcgcaactaacagtgtaaacacaaataccgtgataatgcgctgcataatagattgtttgctctcataagcagcagtttgcatgtcaaaagtcctcccaaaaaatgatcgtgataggtctattataaataaaatgggagaaatttgcatgattttaagaagattttaaggatgtcaggcctgacgtttcgctgcgcactcctgcatatccatgaaatcatgcagttttttcgtcaatccgccgtgcccgaatcggatatttcccttctgccccggcgttttcacgaaatcaaggaatgccagcacataaagacgcctgacgggaatcggaatgacgcccgcatcataaaaccagccgtcaattgtattgagcacgcctttatttatgccgtattgcttcgtgcaccaatgcagaaagcgcacttcgggcaggtgcagataccggctctcccggaaaggaacagttgaatgcttcatatgtaccgcctcctgtcattggctgttttttaagattgttttacttctttgcttttcagggaaaatcgatatttctccaccttatcaatttgtgtcacttgggaattatgaaccgtaatctgaacagtcccgaaatcgagcgtttccagcgcactgataatcttttcgatcacatgcggatctacgtttcctttggacgtcatcatgctcccctttatgtctggacgttcgtcttttgacaatgagtgttttaatccatactattctgataagaaatatataattatactattatgttttcattcagaaatcaacagcatttacacaattttcggatatgttttctttgcgaaaactttcacttcctttgctttgacataaaccgtgtcgccgacgcccgcccccaaggcgtcatattgctgtttttaagaacgcaatcttcacgttccgacatatttaaattgttttccgctgacaaaaaaagcgccccgcctctggacggagcaccttttttctatgcttttgcttcctcgatcacacatgtgacacccatgctggcgagcgcctgctccagagagccgtaagtttgatactctgaaaaatcaagtcccaattggatagaagtctgtgccacatcaggccgaatgccggaaaacacggttctgatgccgaggagaaataacgttttcgacagcatatacaattgctgcgccaccatcgtatcgacaatgggcacaccggacagatcaattacaaggtttgtgatccgtttggcgacacagttttccggcaccgactccaaaatcacacgcgcccgtctcgtatcaatcgcgccgatgagcggcagagtgccgatcgtatccgcgatcaaaataaccggacagctcaattcggaaataagctcctgctgagatgacagcctcgcgatcattaatttctgaaactgttcagtaaaatccgtcatcagctgatcaaacgagccgttgacaaggtaattccagcggcgggcatcctcatttgttacaatgtcctgatgctcatccataaaacgggtgaccgcctcccaaaagacggttcttgaattgccgatcgcctcaacgacctcatgaacctccgcgtcttgctccactctgcttttcgctacctgagcggcccatttttctttgttatgctgaaaaacggccggatcttccaaaaaagcgcttgcgatgaccgtgtttgtaaaggtatgctgctcgatcagcagccgtttcatttcctcacttaattgatccgcagaataaaaacgccctctcagcttccgtctcagcttgagccatttttccgtcagctctgccgaatgtgtaataatataatcatgaagtaattggtctttgttcactgccgtctcctctttcaagaatatgtacttttgtctaaattataaatcggaatcaccgatcgcactagagaaattaaaaaaacctgcacattaagcttttgattgcttttttcggcaggaggatacactataaaagaaatgaaacaggaggtcagtatgatgatcaaaaaaatcgcgacagtcgccgtatacactgatgatcagcaaaaagcgaaaacattctggacggaaaaagcggggtttgaaaccgtcgccgagcatccgatgggaccgggcgccttctggcttgaggtagcgcccaaaggggccgccactcatttggttatttatccgaaatcgatgatgaaaggcgccgagcatatgaaggcttctatcgtatttgagtgtgaagatgtctttgccgcatatgaacagatgaaaaggaacggcatcacctttttagatgaaccgaaacaaatggaatggggcagcttcgtgcaatttaaagatgaggatggtcatgtctttctcctgaaatcgtaatccgtcaggcatcttaattgactttgagaatcattttcatttaaaatgttggataaaacgtaaaaaggattggagagctgccagatgtttgtgcaaatcagaaacatgaccgtaaaagaaggacatgccgacaaagtaatcgaacgcttcagttcagaaggcgtgattgaaaagcaggaaggtttgatagacgtaacggtcctggaaaaaaaagtccgccgcggtgatgaagaagtcgtcgtgttaatccgctgggagtcagaagaccattggaaacaatgggaaaaaagcgaagaccacatcgcggcccacaaagcaaaccaaggcaagccgaaacctgattatatgcttgggacggatgtcggtatgtatcatgtcagagccgttaaaacaggcgtacacgaaaaataataaagagcatttgccccagggcaatgctctttttattttttctcctcaaacggcaggacaaacagcggtttatcgggcttccattccgcatacagcacgtcctccgtttttttgatgttcagctttttcagctcctgattcagctgcttttcttccagcccggcttctttcagattttcatacagcacttcgccgtcaataatcagcgtgaccggcaaagagacttgcttcggctttatttgcatgtcgccgtttttcgtcgtgtcatattgaaatttcggcaggacgctgaccatcccgtttgtttctaaaattgcgtactccgcttcctgtatagaaaagcaattcgcctgtctgagaaggctttgcaattgattaatgtccagcttattctttttcagcacatcatatttcagttttcctttatgtatgataatactcggctcgccctccaacagctttctggagctttttactttctgcgtaatcagttcgatgagataaattaaaaccccccataacagagaagcaaaaatgatttcaataatcctgacgcctttatcatacaccgcatttccgaccagttcgccgaggatgagcgcggaaataaaatcaaacggcgtaatttgtgagaattgagtttttccaagcaattttaaaatcacaaataaaatacccaagccgcatactaactcccaagccactgtaagtaaatgtcccatattcgcaccttcttcttaaaagtcattaccattatggacattcgcctgttttctatacagcggccggcaatacacaaaaaaacgcagacgaggctgcgttttttcacttctgcttactgtttttgattcgatctgacgacccgtaagcatacctcagcggcataaccggcggccgctccggaacccgtaaacatcgcggcaagccccaagcccatgccttcccagccgccgacaccgaaaatgctgtaaacaaccgtaccgaaagcagtcaggcccagcaccgccaaaagccactcaggccacatctttttcggccatttcttacggagcacagccgatacggcaaagttaagacaaaatgcggccagacagatcagataaaaaaaccccatgtcttttgcacctccgtcatgaggagctttttatttgctcacctttttttcaaacaaatgataacccggcgcgagtccttttgattcgtaacccattccgctgtaaaacgactgaagcgccttgtttccggacacgcagtcgagccggattttcgtttttccaggacaagacaccccgtctccgcccaagtcatgatcgtccggccgagccccgcccctgcaaaccgcctgttaatcgccagccggtggagatatacggactcctcatgtccttcatcgccccatagacgtctgtcccacccgcttgcttcgggaagcagcatgacgacgccggccagctcttcattctgcctgaataaaaaaacataccctttggcgatcgcctcccgcatattgtgggtatcttccccttgcagaaggccgctccactggttcgaccctttatcgcgaagccattctgccgcctgcacgagcagatccatgacttcttcttcatcatccttccgggcggaggtgacccggaatgcccccgccttctcctccgtaatcgtaaatggtgtcataaaatcctcctgtaatcagaatattcgacacctttattatagaccaaacgcagaaaggaaaaaaacagccgtcatgtttgagggccgtttaaaaaattttcttcttatcacgttcttcttttaaaatctcaaccgcttccctgaaacgcatagagtgaacgatttcacgctcacgcagaaaacggagtgaatcattcaggtcaggatcatcggaaatatcaataatccattgatacgtcgctctcgccttttcttcagccgcaatatcctcatataaatcagcaatcggatctcccttcgcctgtatgtaagacgctgtgaacggaacgccggccgcattgtgataaaacagcgcgctgtcatggttgacgtaatgatcactgagccctgcatcacgcagctgctccggtgtcgcatcttttgtcagcttataaatcatcgtcgcaatcatttctaaatgcgcaaactcctccgtgccgatatccgtcagcaggccgatcaccttgtcaggaatcgtgtagcgctggtttaagtaccggagcgctgcggccaattcgccgtccgccccgccgtattgttcaatgagaaacttagccagcatcgggttgcacgtactcactttaaccggatactgcagctttttttcatatacccacatttacagatccctccttatacttgccatggccaaggaccgcggccccagtcccattgagcgccggcctgactcacgccgaattgcagaagcggtccgtactcaggctcaaaccgttttctcagctgccttgagtaccgggaatattcatgaaactgctgaagcgcgagacggtcatggggatgcgtatccagataaagcgtcagctccaccaagacaaagtccgccgcctgaatttgctccagcagccgatagtattcatcatcaatctttttcgccatattcgattcccccccgataaggattatcatagaaatcgtaaagatccttccaaagggtcccttttcttaatgcctccatcggagaaaactgctccaagtgataaggctgaaaccgcatataaagatgcggcggcgttctgtagtattttctcccgatcggcgggcagggatcaaaccggctgtggaagggtttataggatttgaccggtgtaaacggctgattttctttcattacgatcctcctttcctaaacacatgaccttaataggtatgaatccgtatcagcatttatgccctgtaagaaaataaaaaagcccgttaaaaacggactccatgcagctcatctggaatttgaagtaaaaaaatcataatgaaaaatctgattgaaagcactgataatgtttcaatgtatattccgtaatttgctgatcatattcaggatattcgtatctcaataaaacagccactgactttgaatatgctctgaagagaccttggcagtcaaacaatgccttccacacgctttcataagtattgccgacataagtattcagcagaatttcccaatctttcgcattcatgtaatgttgaatatacttataattcttccctacacttaatgaaaactgatgctctatcccaatattccacgcaatcatacgcaaaacattaggccttaaaatgtcattcatatggtccagcgcaaacagtatttctttgcgcattaatcctttaatcacataggttgaaaccatccaaaattcattgcagcaatcatcaaactctccgggggtcggtttctttatatgatattgttcatcactcgcaatcatcttactgttgattcggtcatccttgtctaataatatttccgccaaaccatcactctgtgtaaaataatcctctgtttgactcagagggatcaaagttaagtcgattttatgatgatctttaaaaagcatgagataggagaaccagtctccgagttccggagggaaaagttccatatcttcaggtttttgcatcatcattctttcgccaaactgatccagccagctttcatcagatataaaagagtccatatcggtcacaaaataagaaatatcatagtcttgaaatttgtctcgcggtacatttttattggttcttgatccctctaaagtgacaagacggattctctcgtccttcatcgcaatatcaagaatcaatttcatcatttcgtcttcacttctcacatgtaaaacctcccgataaagagatttttacagatcatgcttttcagtttataaacaacttgctcatgatttacagaaatgtcatatgtacttgatgattttgctccaatcgtaccacagctgcaagaacatgagaagagcactcttgctgttccaagagtgcttttcccgaatggtcagatatattggctgtcccgatgatgatggtgatggaacgggtagccgccgtagcctccgccatagccgccaaaaccgtaccccggatatcctccgaagccgccgtagccgccaaaaccgccgtaaccgccgtaaccgccgtaaccgccgtaaccgccaaaaccgtaccccgggtagccgtagcctccgccgaaaccgtatcccggatatcctccgaagccgccgtagccaccgtagccgccaaaaccgtaccccgggtagcctccgtagccgccatagcctccgccgtaaatcggtcttctttcattcatgatttatcgctccttcacataggttacagtccagtttatgacatgcggaaggaaacgtatgggcatccgcccagttttggcgaaataatcaataattgcttacggagaaatacgatacaggccggccgcataagcaaaataaaaaggccggaacttatgccgccccggcctttttgtctttattcgcctaaatctacattgtgataaacctgctgtacgtcttcgaggtcttccagcacatcgatcagcttttcgaattgagctttcgcatcttccggaagctcgacttcattttgcgcaagcatcgtcagctccgcaaccgtgaactcttcaacgccggcatttttgaatgcctcctgcacggcatggaattgatcaggctcagcatacacgataacactgtcatcctcttctaaaatatcgcgcacgtccacatcagcttccatcagcaattccagcgcttcatccgccgtcttgccttcaacgccgataacggcggtcgcatcaaacatgtaagcgacagacccgctcacacccatatttccgccgtttttcccgaatgcggcgcgcacttcaggcgccgtgcggtttacattattcgttaacgcatcaacgatgatcattgaaccgttcggcccgaaaccttcgtaacgcagctcgtcaaagttctcctccgcgccgcctttcgccttttcaatcgcacgctcaataatatttttcggcacactgtacgtcttcgcgcgctcaagcaccacttttaacgcctggttcgattccggatctggctcgccttgttttgccgccacataaatctcacggccgaacttcgcgtaaatccggctcgtatttgcgtcctttgatgctttcttttctttgatattgttccacttacggcccattttgttccactctctttcacgaattgaatctgtatgataaatactctgcttctattatacctcagcggttgggttgtttcgagtgtaagacattagaaaaaacaggcacgcttaaaatcaccggagcgcagtaagccgaatttgaggattattgtacaaaacataaaaaagcctcccttcatacaggaaggaagtcgcaagtcaaaagattcattttattcttattacctatttcctacactgtatatcctgactcccgtggtaaaattttgatatcgaacaaaagaaaggatatggtcatgaaagttttcgaagcaaccaccctgctggccgctgccaaacagcgcgcgggtgaatacaaaaaactgcgcggtcagatggttaatctgaaaaaagcatttcaaggcgtggctgatctcggtgacggcgatttctctggtcggggcgcagataacatcaaagcctttttccaggaccacgccggcgtcacagacagctggcttgatctgatcgacatgaaaatcgcatttctcacaagccttcccggtaaggtcgaagatgccggactttccaattcgcatgtggaggaatcatttctggagcatgagctcacccacgccctcagtaaatcaaaggcgattatggaagagcagaaaaaggacatgcgctccatcctcggtgagatcgatgacatcatctcgcttgatctgttttcaacggaaagcacagatcagaagctttcttcagctgacaaaaaaagaagcgaaacgatacataagctcggcaagcttgatcacgatctaacgaaagaatacgcagaaaccgaagcgaacgaacagttcatccaagctgacttccagcagcttcaaaatgccacgggcaaaggaaaaagcgccacgccgcttcactacaacgccaaggcgtaccgtgaaagcgacatccataagaaaaaaggcgagattgcaagacattcggatgcttatttgaagatgaagaaagaggaagcgaaggaacgagagattgaaaaactgaaagaaagactgaaaaactacgattatgcgaatgctgatgaattctactcaatggccaaaacaatcggctataaaaacctgacaaaagaacagcagcgctacttcactcaaattgaaaacacgcgtgaacttacagacggtttcaaaggcgttgccgtcggcctttatgattccggaaaagacgcggtcacaggcctgtgggatattgtcacagatccgggcggaacggttgaagccattacaggagcggcggctcacccgatcaagacgtatgaagccatttcagcggcaatcgaagaatcgtaccaaaaagacatggtgaatggcgacacctactcaagagcaagatgggtgtcatatgcagtgggcaccgttgtgacatcagttgtcggcacaaaaggcgtcggcgccgtctcaaaaacaggaacagccgccaaagtgacaaccaaagtcaaaacagcagcacgcaaatccgccgcagcacaaaaagcgataacggtctcaaaacaaaccgttgatcacatcaaacaaaaagtaaacacaggcatagaagtatcaaaaaaacgtgtcaaaaccaagttacatcaaatcggagatctcaccctggctgatattctcccgtatcatccgcgtcacgacgtagtgccggcgggcgttccttacaacgcagtcaacggggtcacacttaaagaaggacttcagaaattcgccaaggtcatcctgccgaaaccgtacggaacctccgcaagcggcagacggacaccggcaccgcatgtaccgccggtaacggtcaaatacggcgagcattttgcgaaatggaccagaaagaaagtattgaagccgaatgtcatctataaaacaaaagaaggctacacgtacaccactgacaactatggtagaattacaagtgtcaaagcagacttgcagctgggagaagcaaaacgcaaccaatatgcgcaatcaaaagcaggtaaaccagaccgtctgacagatgacgacggaggccacctaatcgccacccaattcaaaggctcaggccaattcgacaacatcgtgccgatgaattctcagattaataggagcggcgggaaatggtacaaaatggagcaagattgggcatcggctttgcaagcagaccctccccaaaaagtatcagttgaaattaatgcattgtataaaggtgattcattaagacctactgcttttagggtgaaatataaaattggtgatcaagaagctaaacttatgagaatcaaaaatcaggccggaggttaatatggagacaaaaaaaatggggcaattatatcaaaagatagcagaaagcattaatgagatcattccatctgaatgggaaagagttattctttatgcagaaatacttgacgattcatctgaagttttcttttatttcaatactccacatagtgaagattttatatattctcataatatccctgaacactatcatgtcagtgaggagatttatgaggagctgttatttgacttgcatgacttattcgaggaattacgagatgaatttaaagaaaacaatcaagatatatggactaatctaacacttaatctggggataagcggagaattttcgatagactataattatgaagacgttattcaatctccatataccatctctcaaagacaaacaatctggacttataaaaatgtaggaatttatcctaagagtaaacctttaaaatcctttttagaacagtatttaaattctcaaaattaaaattccccctcctttattggggggtttttttgatacaaatgatccttacaaattaccaattataatgctggaggctgatccttgttggaaaatgaattaaatgcattatatagaaacatagctgaaatcgttaacgaaatgataccagaaccatgggagaaatttttgttctatgctcagattcagagacaggcggaggcacttactttttttacaattctcaaaatgaacctaattattttaagtacagtcttgaaattccgtttgaatttgatattgacgaaaatgaattcgatcagtatgagatggaattatttaaactaagcgaaaaaatgagagatgttttcaaagatcatgatcaagaattattttattctttcactcttagcctagaaagatccggaaaattaactgtcaactttgattatacagattggtttaagacagattatagtttcagtgatcagcttatcatctggaaattcaaatacttaagggaagaacctaaggatccatcattacaaaaattaataaaaaaatatttagatgaatatcctgaaaatccaatttaataaagttgggataatgatgttagaaaaagcttatctaaaaataactgatgtcttaggaaaaataattccttctgaatggagcaaagttgttctgtatgcagaaatactagacggttccagagaagtttattttttctttcaaacacccgaaaacgatgaatatatatactctcatgacataccagaacaatttcaggtcagtaaaaaaatttataccggactactactagacctccaagagttgtttatgcagttacacactgaatttaaagaaaataaccctaaagcatggacaaatttgacactgaatcttgaaagcgatggaacgttctcaattgattatgattatgaagatgttattgaatctgatttggacgaatacgaaagacaaatgatttgggagttcaataacttggggattttccctgaagacgaagaggacaaagaatttgttaaggattatctaaatattaaataatgctatcaacaaaggtagaggatcatcaatggtagctgaaaaaatggaacaactatatcaaaagattgctgaacatctaaatgaaatgattccatctcaatgggaaaagatcgttttatatgctgaaatacttgatgactcagcggatatatacttttattttacaacaccaactaatggtgattacttatattctcattatatacctgaacaatttaaagtaagcgaagagatttacgatcaactgctgattgaacttcaagagctatttgaagaactaaaagaagaatttaaactaggcaaccaagatatttggactaatctcactttaaaattagaaaacaccggaaagttttcaattgattataacgatgaggatgttttattgtctgaacttgatgaccttcaaagacgagatgtttggaaatatcaaaatttagggattttgcctaaagatgaggacgatagaaaattcatagaagagtatctaaacatataataagctttcaaacggctaaaaaaaattaaaaaggattctgatattgtggaaactgaaaaaatgggcgaactatatcaaaaaatcgctgagcaaataaatgaaattatcccctctgagtgggagaaggttgctctttatgccgaaattttagatgattcttcagaagtttacttcttctttagtactccacaaaatcaggaatatatatattcacacgatattcctgaacattttaatgttgatgaagatatatatgacgaacttctatatgaattgcaagattactttgaagagttacgggatcaatttaaaacaaacaacgaggacttatggacaaacctcactttgcatctcgaacgaagcggtaaattcttctcaattgactacgattacaccgatgtcatcgcctcagacttaaacggaacacaacggcaagtggtatgggaatatcaaaacttggggattttgcctgaagatgaggacgataaagaatttgtaataaactacgtcggtctataagtcaataatggctcagcacttccttgctgggctattttttataactacatcataccttatgaatgggcaaaaatatatctttatgcagaagtattagatgactctcccatggttctctttcacttcaagacaccaaaaaaacgtcaactgatttattcgcaagatctaccagcctgatacagtgtaaataaagatatcttcaacacttttcaagagaaatccgagaactttttgaggaattaagaattgagcacaaaaagaataatgataaacaaaacaggcagcatccagtaaacggatgctgcctgttacatcgttatgtatcgtctgaagaagtcatttattttgttttttaaatatgaaaatagatatgacggtaaatatgatggctgtaatgacaatgacccacaagctcgcagccgtactgataaaatggccgtttaacttgtagacgatcccgtaatgcttttcatattcctgtatttggtccgcagaagcatgtttaaacactttatcaactgagtctgtcataaacgcttttctgaacagaacggcggtgtggctgatagggaaatacataataatcttctgcacaaacaccggtacgccgccgatcggtacatatactccgcataaaaaaccgatggctgttccgacaatcgtacttaacgtcgaaaatgcattttgtgtgtgaataaacagcgttaaaaataaatttatggaactcgagagtgcaactgaaagaataatgatccccaatacttcaagtatatctgtaccgcttaaaagcttgctgcctgttgaaacgagaaaaatttcacagcctaaaaaggcgatgaaagaaaagatcaagccgatgacaaatgaatgaatgacatagctcaattggatggtcgcccttgataaaggagctgttaaaaagtcatacgttctcttgctttctttatctttcaccataattccgaaagcgcctaaagtcgttgtcacagctgtaatggacagcaatcccgccaccatccattcgttcaccattgctttggaatcatctgtcgaaccgaccagggccttaatggcgtccagctgtgtctgctgtaagaacacggcatataacagaatgacgataaatactgacagcaaagagagaagcaaaagcgttcgatcacggaagtatatttttatatttctgctgattaaactggataaagacttcatttatgcaatgctcccctttactggcaaactgcttccttgttcttcgataatatggataaacacatcatccatatttcctttaatcacttcgaaagattcaatttttccttcaagacctttcaaaatgtcaaacgcttggagagtggactctacacgaagggaataaatagagtttttaaccgtaaaatccagttgtttattttcaaaccatgccgtcggatcaacgccttgcttaaacatcatatgcagactgtcaaacgcatattgatctttgagctgactcggtgtaccctctgcgatcaggcgtccttctttgatgaccacaacgttatcagccacagcggcctcctccatgtaatgggtcgttaaaaagatcgtcatgtttgtttcttcctgcagccttttaatcgcattccaaacaaatactctcgtttgcggatcaagacctgtagtaggctcatctaaaaataatatagtcggtttatggatgatggcacgggcaatatccgctcttcttctttgtcctcctgacaaatcgctgtattttttctccttaatatcatccaattttaaatagtctgttacaaactgatagttctcttgcacttgtgccttgcttaaatgataatattgtccgcggttcatgatattttcataaacggtcaatcgttcatccaaaatgctctcttggaaaacaactccgatctttttgcggatatgattattctctttcccctcaccaagagtataaccatctattaccacttttccggatgtctttttaatcagcgtacagagaatatcgatagtggtcgatttccctgcaccgttcgttcccagaaatgcaaacagctcgccgcgtttgacagaaaaggatacccctttcactgcttcaaatgatccatattttttgcgcagatcggttactgtaataatgtcttgttcttctcccattctgttcacctcgaaaaataagattctataccgttgttcactaactttatatcgtcattcccgccaggattttctcatttttatccaaatttattatctttttataaataattatcttgattatgaagatatacgtacataaaaaggcttcttaaaagaagccttttatcgctttacgttaatattatgctttcattccccaagtcattaacaatcgccactttgttaagaagctttgtaaggatctcctacacaaatagatttttcttttcctgcaacaacggtagaaatcctagtcgcattcgttaaaaagcctttaacagttgtcgcaaaatcttgcctccctgctttttaaaggtacaagatcatagcgtgattttttcccaattccgttttaataaataattaaaaaaggtttcatttgtgcttatatgtggctttttcttcagcaactgatgaagacttaaagaactcattctctttgtaattcatttgcatatgtttcagccttttaaaaaagtaattttctaattgtttgtctatacaataaataaaacagcctttttgtccccgggtcatcaaagttctgtatgtgttgcgaataatttcgtctgcaagcttctcagcttcttctgaattttgctttagcattttcttcaaaccacgtaaggaggtatctgttttcgcccgctttgaatgatcagtcaatactactccgtccctgcacactagatcatttcctataattacacctacataatcaaattccaaaccttggcatgtgtgtatacaacctatttcattaatagaatcttcatcaattgcccacgtgtctgagttatttaaattccaactcattccgaattgatattcaggaatctcgatatcatgaaattctgttttagctttgccttccttcacccaatcccaacagtaaccagcaactattcgagctttattattaactttattcagatcttctatctgtttacgcaattcatttggatttctatatatacgaaaatcgtagttcattccaatataattagaattcgcagtttcccgaatttgaagaacatcatctaaccagcttatataaccatctgaaccattgcaacgaaactgtgaatccagtttcatatttgtaacctgagcatctaattcttttgagaatttaaggattgtatcagtgctaccaatatcttttaatgttactctttgatgttcgtctatgaaaaaaacagaaagtttggaagcatttattatttccttaatttgattttccccaaggttattaaataaaccggatttctcatttaatcgatgcgcctcatcaacaattaaaacgtcaaattcacctgatggagcattgacataactgcccgatcctttaaataaattatcaatgtgccctttccgaaagttttgttttaacttagtagcatatatatttctgggagctgcattttttgttacatattgtgccacaagacttcggtttgttgcttctactaataaatttatagcaagaacagattttcctgtacctggtccgccttctacaattaatacttttttagtgtttgtacgtaatgcctcattcgccaaatgtaaagccgtctcatacacaactttttgattatcaatcatcataaattctcgattaccttgaagcatactgtttaacgaatcttgaagagactttgaaggccttattcttcctttatctattgtatataggatttctttgttgtctccatacttaatatactttttaatgaaatcacgaagcttacctgaatcacctttgataaaaacaggagcttcttttatataatattcatatattgaatcagttaatggatcgtctgtaccctgattcaagtagttatgtaagtatgcacaaggatatagcttgatatcttctttttgcgcattttcattgtaatcctttattaacgaagcgtatgaccaggcttgataggatgggtgggttgtttcgcgaattcctttatttataaacgttttaacgatggcctctttactatcaattttctctactttctcccattgtttaagttccacaatcacaacagatgaacgatcatccttatctgatccagatataagaaaatcaatacgctttgaagtatggggtattttgaactcaatagcaattcctgcgtccttaggaatttctctatcacttaataccctatacatatactgcatagagttatcccaagatctaacctctttctcattgattttgccaatcttatcattatagtttttacagatattcgtcaccaaattgtcgtcaaacacatcactcagaaactcttcttttgtagcttcatagactatcattgtttcaccttttcattaactttttgcgttatctctataaattcgccgctcaaaataactaaattgagctatattgagaataccatttttcttcaaattaatctgttttaatatgacctttgtacttaataattaaaaaggatccttcacatattaatataaaaagcagcgttctccaaaagagaacactgctttatttcaatactagctttgccacacactccacatgattcgtatgcgggaacatatccaccggctgcacttcgagcgtctgatacccgccatcctcaagcacccgcaggtctcttgcaagcgtgcctggattgcaggacacatacaccacccgcttcggtttcatgtcgatgattgtccgcaggagggcttcgtcgcagccttttcttggcgggtcgacgacgagcgtatcggccgtgatgccttcttcataccatttcggaatgacggtttccgcttctccgactgcgaattccgcgtttgtgatgccgttcagctcagcgttgcgtttcgcatcctcgatggcttccggcacgatttcgacgccgtacacttttttcgcctgcttcgccagaaatagagaaatggtaccgatgccgcagtaggcgtcgatgacggtttcttctccttgcagctctgcgtactcaagcgctttgtcgtagagcacttttgtctgttccgggttgacctgatagaacgatctggcggagatggcgaatttgacgtctccgatgaggtcgtagatgtattcttcgccccagatgacgtttgtttcgtccccaaaaatgacgtttgttttatttgggttgatgttttgcacgatcgatttgacgtgcgggaattgcgccgtaatgtctttgatgatcttcgctttgtgcggaaaatcgcttgttcttgtgatgaagacgatcatcatttcgcccgtgacgacgccgtatctgaccatgatgtggcgaagccagcctttgtggcgttcttcgttataggctttgacaccgtatgctgcacagatgtctttgacggcttggacggcttcatcgtttttggattgctgaatcaggcaggcgctcatgtcgatgatgtcatggcttctttgctgatagaatccggcgacgagtccgccttctctttctcctaccggcacctgcgctttgtttctgtagttccacgggtcttccatgccgagcgtcgggtgcacggtgacgtttgagaggtccagcttgccgatccgttctaagacgtctttgacttgtttctgtttaaacaagagctggccttcataggtcatgtgctgaagctggcagccgccgcattgcttgtagatcgggcacggggcatccgttctgtgcgggctttcttccttcagctcgatcaaacggccgaaagcgaagccttttttgacgcgtgtcactttaatttgcgctttttcctcaggcagggcgttcggcacgaagatcgggaagccctgaacctttgcgacgcccgctccttcatgcgtcaaatcctcaaatgtcacgtcatagtattcatttttttctatcgggggtttcattttcatctataatcacctctcgttttaccaaaagccttgtttcagcgtgctggcaaaccttcaaattcaatgtcagccttcaaaggtttccgatcacgctgaaaagatgacaaaatcctaaaacgaatactgttttaggattttgtccgcgtattagtcatccagctgttccgctttctccttcggcatgatgacgtgaatatgccggtacagattcacgaattcgcccggcagcatgccgccgtattcgccgtccaggttcagctgcatcttttctgatacattgactttcacacggttcgcttttgtgtaaataatgtgctgatcgttaatatgatcgcctctgagcgccatgctcgcgactctgataaactccgcgagattggcttttttcaaaataattaaatcaaacatgccgtcattcaggctggaatcaggggccagcttctcgaatccgccgaccgagttggtcagcgtcactaaaaacagcataatttcgccttgaaacagcttgccgtcatattcaatctcgacttctgtcggtcgaagtgaaggcaacatttccattccctttaaataataagcaagctggccgagcatcgttttcagtttgcttggcacatcgtacgtcagctccgtcagacggcctccgccggcgatgttgataaaatactgaccattcacctgtccgatgtcgatcgggcgggccacgccgttaatgacggtatcagcggcattcagtatattctctctcggaatgcccagcgctctggcgaaatcatttgtcgtgccgaccggaatgatgccgagtgtcgggcgtttgtctaacggcgcaagaccgttgacgacttcattaatcgttccgtctccgccggctgcgacaatcaggtcaaactcccgcaaagcggcttctgttgcggcgtgggtggcatcccccgcgcatgtggtggcatgggtggaggtttcataaccggcttgttcaaatttttgcaggacctgggcaagatttttcttgaaaagctcccgtcctgaagtcggattgtatattatgcgtgcacgtttcattatctcatcatcctacttaagagtatccgatccattattaacactaacaacctttaattatactatgacttgagaaaatcgcaacaatatgtacaggaattgccagaagaaaaaaggccccggctccgtttaaggagccaaggcccgctgtcttactcttcttccgttccaggttttttcttacggaatttcgctaatacttcatatacgatcggcacaatcagaagagtcagcagagtcgaactgattaaaccgccgataacggtgacaccgagtcctttagaaatgacctggcttccgccttcaaagcccaatgccaatggaagcagggcgccgattgtcgcgatcgccgtcatcagaatcggacgcaatctcgtagagccggcttccaggagcgcttctctcgtcgataggccttccgcttctttatggatgacgcggtcaattaagacaatcgcgtttgtgacgacgattccgatcagcatcagcataccgatcatggcattcagactgaccgtctctccggatacatacagtccgactaatgcgccgatgactgtaaacggaagcgagaacagaatcgcaaacggcgctaatgctccgccgaacgtgatcacaagaacgaggtatacgatggcgattgcggcaagcatcgctaacccgagtttcgtaaaggaatctgcaatatccgctgatacaccgccggtatcaatcgatacattgtccggcttatccagtttgtcaactttcttttgaacggctgatgacaccttcgtgacgttgtcagaagtgacggttgccgttacgtcagcgtacactttgccgtcgcgtttggaaatggtatcggatgtcgtgccgtttttcactttcgccacatcgccgattttcacttcttggcctgcaggtgatgtgatggttttatcctctaattcttttacactcttatactggtctttttctgttttgatgttgacgtcaagctctttgccgtcttttttcaccgttgtcaaaggagactgtgacgtttgggacatcagggcttgggagatttgcgaagccgtcaggccctgcttgctgagtttctcctggtcagcgacgaacgtgtactcatcatatgtgctggaaaggcctgagttgacgtctttcagatccttctcctttttcatgatgccttcgatgtctttgaccgtgcctttaatatcagactctgaatctccgtacacatagtacgttaattcgttgttgttgcctgacgaactgaaattttgtgatttccattcgccgcggctcgatgtttttttgatttcttttaagacattgtctttttctttgtcaaaatcaggcgtgtcatcctcgtatttcacgtagaacaatgcgccgtttgagcttccgccgagcggactttgcgatcctaaagaatactgaacagtatcgacatgtttgcgtttaagcagcatatcttccgctttttgcgcagctttttcagcttcgcttttcgtttcgcccggttcaggcgtgtatgtgagctgcatcgttttgtccgcttgcgcaggcaggtagctcgcgccgatcagaggtacgaggaacaaactgccgacaagcatcagaaccgcgatgatagatgtaatccatttatggcttaatgaccaattcagcacttttttatagaaattggccaatctgcccggcttatgctctttcgctttaacaggtgcgcctgtgagcgattttttgaataagctgtgcgcaagcatcggcaccagtgtgatcgaaatcaacagtgatgcggcaagcgcgaagacgattgttaaggcaaacggcataaacagttcgccgatctgtccgccgaccatggcaagcggcaggaatacggcaatggttacgatcgttgatgacatgatcggtttaaacatttcttttgtcgcttcacgcaccaattgcttcccgcgtaaaggttcatctttcagcctcatgcggcggtaaatgttttcgatcacgacaatcgagtcgtcgactacccgtccgatggcgaccgtcatcgcaccgagcgtcattatgttcaatgtgacatcaagctgattcagcacaagaagtgcaatcagcagtgacagcgggatggaaacgatagaaatcatcgttgatttaatatctcttaagaataagagaatgatcacgaccgcaaaaatcgcgccgaaaatcgctttgcttaacatcgtatccactgactctgtaatcggctctgccatatcaagagtcgagctgtacttgaaccctttatggtcttttttgtattgattcagttcatctttaatcgcatcggccacttctaccgtgttggcgtcattggcttttacgatattaattccgatgctgtcctttccgttcgtgcgggaaatggattcagcttttttcacatctttaatgtcggcaatgtcagagagcttgactgtcggcacccctgctgacgcgctttgctgtgcctgctgcatagcctgagcgtccgccgcagatgccgcaccggctccgcccgcttgaccttgagcggcagaagaagatgtgaccggaattctcatctctttcagatctttaattgacgtaatatttccgttaacgacaactgatttttctttgttgccgaatgtgtacaatccaagcggcgtattgacgtcagagccttggatcactttcttgacggtatcttcatcaagtccgtactctttcatttttttatctttgaaagagaattccacctgctcttcctgctgtccggaaacttgtacggacgcaacgccctgaatgccttcaagcttaggaacgagagtgttttccacatttttagtcagatcttcaagcgagcttttgccgcttgtcacactgagcgtcaaaatcgggaaagagttgagactgtaacgggaaatgtcaggttttttcgcgtcatcaggaaggctgacactgtccagcgcttcagcgacttcggttttcgccttgtccatatccttgttgtaatcatattcaatcataaccgatgagacgttttcagaggatgtggacgttacgacgctcactccttctaaattctgcaccgcctgctcgatcggttttgtcacgtcatccgcaacttgactcggagcagctccgggataagtcgtatttactgagaggtaaggcatgttgacgtccggtatggattcctgcttcatattcagaccggcatacagccctgctacagtaacgataatcgtcatcagccaaactgcgaatttgttcttcagtacaaagttaataatgtggttcatcatgtcctccgttaatttttattgactgactggtcattctatataatactaaacggtataactcaacatcgtcaactaataaggcagtaaatttttctaaatttttcaggattaaggggaagcacgtcatgaacgaaaaaaaagagaaaatcataaaaacaggcatccatttatttgccaaaaaagggttttcttcaacaaccattcaggaaatcgccggtgaatgcggaatttcaaaaggggccttctatcttcattttaaatcaaaagaagaccttttgctctcagcatgtgagtattacatcggcatgtctatggaagaaataaagaaaatcaaaacagaacatcagcataaatcgcctaaggacgtattccgaaaacaaatcgcttatcaattccaggaatttatggagcacaaggactttatcattctcttgctgagcgaaaaggtcattcctgaaaatcaaaaggtcaaacagtattttcatgaggccaatattcaatttaacatactgtaccgggatgctttgctctccgtttacagagatgccgtcataccgtttatagcggatgcgtccgttatggcgcaaggaatagtgagctcctatattcatttcttgatttttaatgaacatacggcattccggacggaaaacgtggcggcctttctgattgccagaatcgatgacctgattacgggactgataagagacaatcccgatccgctgctgccgcaggatatcttcactcagccggcggcggacagagaaagactgcttgcggatattcaaaagataaaagcacagcagggctgcctgaggacgtcctcgtatcgcttgaagtcattgaagaggaatacgcaaaggaagagccgcgaaaaccgattattaaaggaatgctgtccaacttggcaggcagcggaaatgagcagattgaaacgctgcgggcttccattgaaacctatttcagcttataaaaaaagagaccggcgcttaccggtctccgtgtcagcagcgcccttagaggcggctgctttttttatcgttttttgatttcttcaagtaagatcttgttgaccatcggcgggttggcctgtccttttgaggctttcataatctgcccgacaaggaagccgatcgcgcggtcttttccgtttttgaagtcttcaattgactgcgggttgctgtcaagcgcatctgttaccagcttcagaagcacgctttcgtcagaaatctgcacgaggcctttttctttaacgattttttctgcgtcgccgcctttttcaattaattctttaaagactttcttcgcgattttggacgagatggttcctttttcaatcagcttaatcatgccggcaaggccttcaggagtcagtgcgacatcctcaagctctttttgttcggcattcaggtaagctgacacttcacccatcagccagtttgatgcctgcttggcttccgcgcctttattgaccgtttcttcgaagaaatcagccatttctttcgtcagcgtcagaaccattgcgtcataggccggcagaccgagctcttcgatataacgcttgcggcgctcgtccggaagctcaggaatggttgctcttacgcgttctttccattcgtcatcaatgtagagctcgacaaggtcaggctcagggaaataacgatagtcgtccgaaccttctttgacacgcatcaaaatggtttttttcgtcgcttcatcgtagcggcgcgtctcctgctgaatgactccgcctgacagaagcacctgctcttggcgtttctcttcatgctcaagtcctttttgcacgaacgcgaaggaattcaggtttttcagctccgtttttgtgccgaatttctcctggccgatcggacggagggaaatgttggcgtcacagcgcagtgaaccttcttccattttacagtcggaaacacctgtgtattggataattgatttcagcttttcgagatatgcgtaagcttcctcaggtgtgcggatatccggctcagatacaatctcgacaagcggcgtgccctggcggttgaagtcaacgagggaatagccgtcgcccgtatgcgtcagttttcccgcatcttcttcaaggtgaagacgggtaatgccgatttttttcgtttttccgccgacttcgatttcaatccagccgttttcgccgatcggcttgtcaaattgagatatttgatatgccttcgggttgtccgggtagaaatagttttttcggtcaaacttcgtatccgttgcgatttcacagttcaaagccattgcggctttcatcgcgaattcgaccgcttctttgttcaaaacgggcagcacgccgggatagccgaggtcgatgacgcttgtttgggtattcgcttccgcgccgaatggcgtcggtgagcttgagaaaattttagattttgtttttaattccacatggacttcaagtccgattaccgtttcaaagttcacttcatttcaccccttacagttcaggtttcgctttatgatgatctgttgcctgctcaaaagcatgagcgacgcggtatacagtgctctcatcgaagtgttttccgatgatttgcagtccgagcggcagtccgtccgcaaatccgcatggcacgctgattcccggcacacccgcgaggttgacagggatcgttaaaatatcgttggcgtacattgtgagcggatcgctggttttttcgccgattttgaatgccggtgtcggcgttgtcggtccgacgatgacatcgtatttctcaaatacgtcttcaaaatcttttttaataagcgtgcgcactttttgcgcttttttgtaatacgcgtcatagtagccggagctgagcgcgaaggtgccgagcatgatgcggcgctttacttcgttgccgaagccttctgagcgtgtctgtttataaaggtcgatcaggttgtccgcattgtctgagcggtagccgtagcggatgccgtcaaagcgcgcaaggtttgcagacgcttcggaagaagaaagcagataatacgttgcaagcgcgtatttgctgtgcggcagagatacttcttcccatgtcgctccgaggtcttcaagcacttttaaagcggctaaaaccgattctttcgcttctttgccgacgccttctccgagatattctttcggcacggcgatttttaagcctttaatatcgccagttaatgaagaaagaaagtccggcacttcgacattggcgctcgtagagtccattttgtccgggcctgaaatcgcctgaagcaggaatgcgttatcttctacgtttcttgtgatcggtccgatctggtcaagtgaagacgcaaaagcgaccaaaccgtaacgtgacacgcgtccgtatgtaggctttaatccgacgacgccgcagaaagaagccggctgacggatggagccgcccgtatcagatccgagtgaaaacggcacttctccggctgcaaccgcagctgcggaaccgccgcttgatccgccgggaaccgtatcgagattccaagggtttttcgtcgctttgtacgcggagttttcagtagaagaacccatcgcgaactcgtccatattcagcttcccgattgtgacggcttcagcggcttgaaggcgttccacaaccgtcgcatcgtaaatcggatcgaagttttcgaggattttgcttgagcatgttgtgcgaagccctttggtcacgatgttgtctttgacgccgatcggcattccgaagagaagaccgtgttcagaccgtccgtcaaccgcttcgtcaagttctttcgcgtaagcgcgggctctttcttcatcaagctgtaaaaacgcctgcaccttatcatccacggatgcgatccgtttgtaagattcatcaacaagatcggaaatcttgatttcttttttatgtatcatttgtttcagttctgtgattttgtgatcaaataatgacatactgtctccctcctttaatccagaatagatggcacacggacatagccgtctttatgatcgggagcatttttcatgacatcctcgaccggaaggcctttacccgcttcatcttctctcattacgtttttcattttcagcacgtgtgttgtcggttccacgttatccgtgtccacttcattaagctcctcggcaaacgagatgatgctgtcaagctgttctgtgaacatttcagcttcttcatccgtaatggcgagtctcgccaaatgagcgacatgctttacttcttctatagaaattcgtgacataagatccacctccgcataattctccgtttcgtcatataatactgatcatatcaaaaacgagccctctaaagcaacaaaacgccgccttctgaggcatgatgaaaccctctctattttatcctaaatcggggagaaagagaaacgaattatatgtcagaaaatttttacttttataatttattggtagcgctttcttctttaagctgttctaggttggcggggattttttccttgagcgggccaggtttcgagagttgattgatcggggatactttgttaggtttagtaaccatagccggcactaaatcatgcgatccccatcgaaagatgactaaaggcaggctggatcgccggcactactaatctacagaggtgatgcaacatttacatgaaagaagagagggtccaaaaacgtgagtattgaattaattatatctcttggcatttactttgccgccatgctgttaatcggctggtacgcattcagaaagacaacgaatattaatgattacatgctgggcggaagaggactcggtccgttcgtaacggcgctgtccgcaggtgcggcggatatgagcgcatggatgctgatgggagttcccggcgcaatgttcgcaacggggttatcgaccttatggctggcgctcggtttgacgatcggcgcgtattcaaattatctgctgcttgctccgaggctgcgcgcttacacggaagttgcggatgatgcgattacgattcccgattttttcgataaacgattccgccactcgtcatcattgctgaaaattgtttccgccgtgattattatgatctttttcacactgtacacatcgtccgggatggtatccggaggcaggttatttgaatcggcattcggcgccgactacaaattcggtttgtttttaacggcgggtgtagttgtgctttatacgctgtttggcggtttcctcgctgtcagtctgactgactttgtacagggagcgatcatgtttgcggcattagtgcttgtgccgatcgttgcttttacccagctcgggagcgtttcaacgacgattgattcgatcaacgccgttaacccgaaactattggatatctttaaaggcgcgagcgtcattagcattatttcttatttggcatggggactcggctattacggccagcctcatatcatcgtacgatttatggcgattaaagaagtgaaagatttaaaacccgcccgcagaatcgggatgagctggatgtttatttcagttgtcggctcattgctgaccgggattatcggggttgcgtattctcatcacttcggggtctccgtaaaagatccggaaacgattttcattattttttctaaaatcttgttccatccgctgattacgggcttcttgctgtccgcgattttagcggcgatcatgagttccatttcctcacagcttctcgtaacggcaagcgccattacggaagatttataccgcgcctttttcagacgggaagcgagcgataaagaattggtcatgaccggacgcctgtcggtattgatcgtggccgttatcgccatcctgctttccatgaatccgaacagcaccattcttgatctggtcggatatgcgtgggctggcttcggttcggctatcggccccgcgctcttgctcagtctgtactggaaacggatgaatgaatggggagcgcttgcggcgatgattaccggggccgcggccgttttaatctggattacgacagggcttgccgcttcaaccggcgtatacgaaatcattccggggttcttcctcagtctgattgccggtattgccgtcagcctgctgaccaaaaaaccggccgatgcttcttatcagctgttcagccggatggaagctcttttgaaaaacaagaaatagacaaaaagccgtcagattttatccctgacggcttttttcttccgcacttgtcctgctataaatactgtgagaaaatcatatcaatttattataagaaaaattgcggaggtgctgtgcaaattgagctggcctatcgaaccagacattttattaaagctgggcattgccacgctgatcggcatgatcatcggtcttgaacgcgaactgaaaaacaaaccgctcggactgaaaacctgtattgtcatcgccgtcagctcctgtatgctgacgatcgtcagcattaatgcagcatatcatttcccgaaatattaccgtatcatgatggatccgctccgccttcccgcccaaatcatttccggcgtcggttttatcggcgcgggcgtgatcctgcgtaaaagcaatgacgtcatatccggcctgacgacatcggctatcatctggggcgcggccgggctgggtctggctacaggcgccggcttttataaagaggcgttcgcaagcctcttgtttatcctgatcagtgtcgaatttcttccgtggctgatcagaaaaatcggtcccaatcgcttgaaggaaaaggatatccgcgtgagaatgtctctttccgataaagacaaaatgaccgagattttaaaggaaatgaaaagcaaacagctccgcattcactccgtccggattgatgacctgggtgaaaaagaatttccgattatggaagtgaaagtcagtgttcataaaaaccgctacaccactgacgtctattatgatattaaagaaattcagggcgtcgtcggagtaaaatgtgatacgttataaaaaacgccgggctggattcagccggcgtttttctatttatacgaatgcagaaaattgatactccgtaatcggtgtttcattttcgatatcgcgcctgaaggctttcagcatcccgagttcctcgtccccgagtgaattgaggtcaaacgcctgatgcaataatccgtagatcagcatatggcgcagccggaggaaatccgggatgtgttcaaaccatgcggaatcaaggtcattttcttccctgtagcctttcataaagtgagtcatgaattcacccgtaaacgcggccttgtcttcatacgggatgaccggataccacaacatgttgtacagcagaatactgatatcattcacaaaccaattgtagccgatatcatcaaaatcaaatgcagtgatttttccgttgtcccaattaaaattgccatgatgcagatcggcgtgcacaaggccgtagttttcaggattcttcggcaaacggcgcagtttttccattagagcatccgcccgctcaaatacgagatgctgatctgcgggcacgtattttctcagcttcagctgctcctcttcatcccattcctgccttttatatgccggatcgctcagacggtagcttttcgtcagccggtgcatgttccccgtgtactttccaagctggtaaaacagagttccgttccagtctgattcctccactttgcgtccgggcgctttttcatagactcttaataaaaacgctccgccttttccgtccggcacttcttcgacatctttgccatttaatgaaggaatcggctttgctactgaaagcccttcctttgccagatgatgaagccattccatttctccgagaatatattccggcgttcttctgatcgtatgcgtaatttttaagatatacggttcgttatctttcacaatttcatatacgtagttctctgcgtccgcaataaattgaaacttggtaaatccgtatatttcaccggcttcagccagcaccttatcttcctcaaaaatcgctttaatatctttatgcatgctgattcacccttttcataacatttgtaggcggtgtgtgtactcagcaaatgtcattcatcaacattcctgcccttcttttttcacagcagattcgtaacatccgcttagaaatgatatgtgttttcctgttaattcctaattatacaaatatcttaacatacctcattcctctctccaacgatattcacactaaaaaacccttgctcatacagaaatgaacaagggcatcttggttaatcgtaaatatggacggtcggttctttgtcacccgcattgcggacgatcagcgcttcctgcccgtcagacgaggtaatgttaatttcgacatcaactgagccttttgaataataatccatcagctcacctgttaagtattgggtgaaggcgatgacttcacttttcccgtaaaattgcatcgggatttcaatcttcatttttctcatttcatcgttttcgtacattgccgttccgacaactccggtgtaattcgggaagtagctgtcgatggcgtttttgaagcgtttaaacacttcggaatcatcagggtatttctttgccgtgtctgtatccgccggatagaagacgtacttttctttgacatcatcccagtttgaaatggtggatgagccggccttgacttctgttttcgcaatgtaattccccggtacgattgatgttttcggcgcttgtttataaagggcgacggtaatcggcacatttttcaggttatccattttccgaaggcggttaacgacttcctgtgcgatttcttcgccgtggctgcggatcgttttgtcgctgagctccacttcctgctgcggatcacctgtgttttcgcggtaatagtatacagagttgagagcgagaccgatcatgacaccgccaagctggatggaatttttatcttttcttactaagtaatcctgctcaagcatggacgctaagtaaatcgggctgttttcgtttttctcttttgctgatcccgagcttggcagcaccgggtttaagccgagattctggaaattggcgtctgcctttttcgcctttttcagatcactgccctcttttttgcggtcaagccagctgagaaccgtgtcctcatctaaatactggccttcctgatacaaatagtcatccgtcgggaacgtgtcttgagcgagccgcatcagcccagtctcgaattcatcgatgtccagcctcgtgttcagccggtccgcggtcaggccgcgcgcttttccggccttaaacgggagcaccattttatagtaggaatcagagatattatatttcggtatgatcgctttttcagaagactttgccgttttctgcgtgatctcttcctctttttttcccccgaaactcggcgaacaggccgacagcatgagtactgccgccgttgccgtcgccgccaatgccaacatctttttcaatagaaaacactcctcttatttctttagctctcccaatagctgtgcttcattccatacttcaatgtttaattcctgcgcttttgtcagcttgcttccggccgcttctccggcaatcagcaagtctgtttttttgctgacagatcccgtcagctttccgccgagcgcttcaatctgcgccttggcttcatttctggacagctcttcaagctttccggttaacacgatggttttgccggcaaaataagagtcgctgtcctctgcttttacttttttcgggcctttgtagagtgtgttcacaccgagttcctcaagttcattcaaaagctcaagcatttcctctttgcggaaataggtgataacggcatcggccatcttttcgccgatttcatctaccgcaagcagctcttcttccgtggcttgtttcagattttccaggctttcaaaatgcatggccagtgttttggccgcttttgagccgataaaacggatgccgagaccgaacagcaggcgttccagcgaattctctttcgacttttggatggagctgatcagattgtcagttgatttttcccccatccgctcaagccggatgacctgttctttcgtcagcttatacaaatcagcgacattacggacgagatgttcacggaaaagctgtgtgatgacacgttctccgagtccgtcaatattcatcgcgttgcgtgagacaaagtgaatcaggccttctctgatctgcgccggacattccggattgatgcagcgcagcgcgacttccccttcaatgcggacaagttcgctttcgcactcagggcagctggtcggcatattgaattctttttcttccccggtccgctgttcaattaagacattgacgacctcagggatgatgtcgcccgcttttttgacgaccactttatcgagaatgcggatatccttctctttaattaaatcttcgttatgaagggatgctcttgagaccgtcgttcccgcgacttttaccggttccagaacggcggtcggcgtaataacgcccgttcttccaacattcagttcgatatcgagcagttttgtcacgacctcttcagccgggaatttgtaagcaatcgcccagcgcgggctttttgccgtatacccgagttcttcctgctggtcgagcgaatcgactttgatgacgattccgtcaatttcataagggagatcggcccgcttcgcctgcagctcttcgatcatttcaatgacttcatctatcgtgtcgcattttttccgttcctggtttgttttaaaaccgagctcatccagaaaatccaggccctgactctgtgtttccacacccatctcgtcaagctccgctatactgtagacgaagatgtcaagatttcgtttcgctgcaattttcggatcgagctgtctgagtgagcccgcagccgcgttccggggattggcgaacggctcctcttcatgtttcagcctttcctcattgagcgcttcaaatgactgtttcggcatgtacgcctctccgcgcacttctatggaaagattacgtttcattttcagcggaatgttgcggatcgtttttaagttttcggtgatatcttcgcccgtcgttccgtctcctcttgtcgcgcctctgacgaaatagccgtcttcataacggagagaaacagcaagaccgtctattttcagctccacattgtaagcgacgccgtcaccgacagcctgacggacgcggcggtcaaaatcgcggagatcatcatcgttaaatgcgttgccgagactgagcatcggcgtgccgtgctgcaccttttgaaaagattcaagcaccgctcccccgacccgctgtgtgggcgaatcaggcgttctgagttccgggtgctcttcctctatggcaatcagctcctgcatcagtctgtcgtactcggaatccggcacgctcggttcatctaaggtgtaatattcataactgtactgatcgatggtgcggcgcaattcttctgcccggtgtttcgctgtttctttgtccatcatgttcttcctttcctcttcaggttactgcttttcaatcggcgcaaaagcggcaagcagacgcttcacgccgactgggctcgggaatgcgatatcaagctcggtgctttcgccttctccttttacgctgacaaccgttccggtgccccattttttatggcccgctttatcgccgaccgcccagctgagcgagtcgccgcctgttttgttcgcataggaaacgggacgggatacgggcccgcgtttcggctgcacttttcttcccggctgcatgcgaggtgttttcttctcatttaggttctccaataaatcgccaggtatttccctgataaagcgggattccggattcatattggtgcggccgaataaggttcgcattttggcattcgttaaatacagttcttcttccgccctcgtaatgcctacatatgcgagcctgcgttcttcttccatctcggcttcttccatcagggagcggctgtgcgggaacacgccttcttccatgcccattaagaacacgactggaaattcaagccccttagcggcgtgcagtgtcattaaagtgacggcatcctttccgcctgcttcttcttccttctggtcgagctggtcaatatccgcgatcagcgccagatcggtcagaaacgcgacgagagacttgtcttcgcttttttgttcgaagtttttcgtcacggaaagaaactcgtcgatattttcaaggcggctttgggcttcgattgatttttcggccttcagcatttctctgtattccgttttttcgagaatttcttccgtgagttccgtaatggacaggtaatcctgcatgttcgtcagattttcaatcatcgcgccaaagccgtcaagcgcgtttgccgctttcgcgctgacaccgatgaaatcaacctgtttgatcgcctggaacattgacattccgttcatcgccgcatatgaagcgattttttctagcgaagtggcgccgacgccacgcttcggcacattgacgatccgcgtaaaactgatgtcgtcgtccgggtttgacacaaggcgcaggtatgcaagaatgtctttaatttctttcctgtcgtagaacttggttccgccgacgatattgtagttcagaccggattttaaaagggtttcctcgatgacgcgcgactgggcgtttgtccggtataaaatcgcgatatcggaaagcttccgccggcccgagctgtgcagctcataaattttgcccgcgacgaattggccttcgccgaattcattgtcgccgctgtaataagaaagcttgatgccttcgtcattttccgtccacaggtttttcggcttgcggtttgagttgtttttgatcacttcgttagccgcctgcagaatccgctttgttgagcggtagttttgctcgagcagaatcacgtttgcgctcgggtaatctttttcaaaggaaaggatattcgcgatatccgccccgcgccatctgtaaatggactggtcggagtcaccgacgacgcagatattttcaagacgggccgcaagctgcttcacaaggaggtattgcgccctgttcgtatcctgatactcgtctacgtgaatgtactggaatttgcgctgataaaactcaagcacttccggcacacgctcaaaaagcttaatcgtcgtcatgattaaatcatcaaaatcgagcgattggtttttcagcagttttttctgataatcggtatacacgtcactcgtgacctgatcgtagtagccgccggccgtttttgcgaattcctcaggttcgatcagctcgtttttggcgctgctgatggagcctaaaatacttctcggatcaaactttttcggatcgatattccgctctttcaaaatccctttaataacggaaagctgatcagccgtatcaagaatggagaagtttcggttgatgccgattctgtcaatatccctgcgcagaatccgcacgcacatgctgtggaaggtggaaatccagatttcatccgcgccgggtccgagaatgctctccacccgctccttcatttctctggcggctttatttgtaaaggtaatcgccagaatgttccatggcgccacgtgtttttccgccattaagtatgcgattctgtgcgtcagcacacgtgtttttccgcttcccgcgcccgccatcagaagcagcggaccgtccgtcgtcttgaccgcttcctgctgaacgggatttaatccgcttaataattgattgctaatgtaattcatatccgttcaccgcctatcaaacatatgttctatcataaatcaatttcgtccgcttggctactttgtctttacagccgccaccgttttgagcgcctgatcaaaatcttcatatacggcatttccgacaacgatgacatcggcatgacggccgaaccgttccgccgtttccgcgtctttaatgccgcctccgtaaaacaggacggacttgtccagcacagccttcgttttctccaccgtttctatgtccgccagcatcccgctgtattccagataaaaaatcgggagatgaagcaaatgttccgcgacccgcgcataggcgagaatatcttctgtttctatatgtgtatccgcctccgtcaaagcggccgccttacaatcagggttgacgatgcagtagccctccgtcacgatttcctccattgacatgagctctccgtattctttcatcgcctgatgatgcatgccgacaatccagtccgcctttttgctgttgagcacactcggaatgaaataaagatcaaacccgggcacaatggaatcaatcgtcgacacctcaagtacgcacggcactaaaaaccgccgcacctttgacatcagtctcagcacattgtcctcggtgatattgtcgcttcctccgatcacaatggcgtcagtccctgattcacaaagccgttccagctgttcatccggtaaatctttattcggatcgagtttaaaaacatgcttccactcgttaacatcgtacatgcgttttcgttcctccattcgtttcttgccatttaaacattataacaaattcgtttggcccggaaaaacggaaaaagacgtcattcacctgattcacaaaaaaagattgcgctccgccggacgggaaacggctatgtttgaaaacagacaaaatgtggaatgtcaaagagaaaaaaggcaaggagtctgatctcaatggaacaagccattatcgtactgatttgtatattgatttttattattttagttcccgccgcattgtttctctggatttacataagagacgaaaagcaggaagaacattcagtgctgcgcaattatcccgcagcgggaaaactgcgctatatatttgaaaaaatcggacctgagctgcggcagtatttattcagcaatgataacgaagaacagccgttttcccggagagaatatgaacagacggtcatgtcgggaaagtataaaagcagaatgatgggcttcggctcagaacgggatttcgatcagccgggctattatatccgtaacgccctcttcccgaaacaaagggaggagctgcgcacagatcagacgccgaagatcgacacgatggtatacaagattgacaaagacaacctgctgaaacgcagcgaacaccgcgaaaaagcaaaagcggacccttattacctgcatccggacgatgtgcaagtgatcggccgcgacacatgcaagaaaccgttttatgtaaaagggttaatcggacaatcagcgatgagctacggctcacttggcgaccgggcaatcaccgccctgtcaaaagggctgcaccaggccggcggcacatggatgaatacaggcgaaggcggcctgtctgagtatcacttgaaaggcggcgcggatattatctgccaaatcggccccgggctgttcggcgtgcgcactgaagatggagaattttcatgggaagaatttaagaaaaaaagccgcctcgagcagattaaagcctttgaattaaagcttgcgcaaggggcgaaagctagaggcggtcatattgacggttcaaaggtgaccgaagaaattgccgccatcagaaatgtgcagcccggacaatccattgacagtccaaaccgcttcaacgagttctcaaatgttccggacatgcttgatttcattgagaaattaagaactgtcggtgaaaaaccggtcggcatcaaaattgtcccgggcagccgcaaagaccttgaagaccttatttcctgtatgagttcatcaggcaaacttcccgactttattacgattgacggcagtgaagggggaacgggagcttctttccatgagctggcggattccgtcggcctgccgattctgaccggcctccccttgttgacggccttttgaagacatacggtataagagataggctgaaaattttcgcatccggaaagctgctcactcccgataagattgccgttgccctcgcgttaggcgcggattttgtcaatattgcccggggaatgatgttttcagtcggctgtatccgcgctcaagtatgccacaccaatcattgtcctgtcggagtggcgacaaccgatccaaaacttcagcgcgcgctcagtatcgaggataaacagcatcgcgtctgcaactacgtgctctcgttgcgtgaagggctgtttcatcttgccgcggcggcgggtatcagctcgccgattcatttctcagctgaacacatcgtataccgggaggaagacggaagcctgagggaacttcccggccttttgaatcagcacgcataaaaaaaccgcctgccgtcatcggcagagcggttttttacgtagctgaggaggattctcctttgtttacgcggtcaagcgccatttcataggcgtcgttcccgtaatttaagcagcgcttcacccgggaaatcgtcgctgtggaagcacccgtttcgctttcaattttgtgatacgtatttccttcgcggagcattctcgccacttccaaacgctgcgccagcgattggatttcattaatcgtacaaagatcgtcaaagaaacgatagcattcctccagatctttcagcgataaaatagataaaaataactggtccagttcttttccgcgtaatttatcgatttgcatcgtcaaacaccttctcctttactaatggaagctgcatcgagatcaggcacgatattaatccatgtctttcctggcacaaacggaagaatctcaccgccttttacgggcagaatacggccgtctttatattcccagtctgactccataacatcgccgtgctgaagcaggaggcccttcccccctgactgaatatcgatggcccgccttccatctttgtctgtcatgcgatggccggcttcaacaataaaaatgttgtgcatggctaaaggctttccggtctcccggtctgtcgctttcacaccatcagagcttcttgtataagcatcagcttttttatcataatcgtattcgacaagatttgtaacgttttgtgttccataatctatccgaatattgtaggtttcgtttccgggttttgcatctgatgtctgaaatgggagcggttctgtttttccgttcagcttgtatcctttttgttccgccgccttcctgatattgtcatacgacgtgtaggaattgtggggcggcttgctgaaatcggctctccaaaacaggctgccgtcaaaatccaaaccgtttatataatcgtaagttccggactccagctgctttttagcgccgggactccagccatgatggacaaatatgctgttaaacccgctgctgagcgtgacaaaatattccctcgcgctccgcacaggcccgaccgtttccggcatctcactttgaaaaatcgcgagaaaccgcgtaatccggccctccgcgagcgcttcgatgacaacatccgcctttgacagcccggattggggcctcgccttcggatgattgttcactgcgactgcaatcggacggcgttctgcaagcttctgctcagttttcagccccgttaaaggagcttccgcttctttcggctgcacctgatcggcattgttctgccggcaggcggcaagcagcaaaaacgcaaaacaaagcatacaaacggttttccatcttttcatatgtcggctccctgcttttatattttaacgcattatcgatggaaagagtacagtttttttcatcacgtcgaatattcctctcggcgtaatgcggatataaggcaggtgtgtgctctgcaaaaagagcagcgtatagatcggatcgcagaatcggtagccccgctcctccagcagcgtcctcagtttttgctctttctcaagcacttcttcataattctccgcggatgcagaaccgtttaaagcgaggggaatctcatgaagaaccttcccgttttcggcaagcacgattccgccgccgatttctttcatccgtgagaaagcgagcaggatatcttctttattttttccggcagcgataatatctccggttgtcgtgtaggaactgacaaagccctgcacccgatcggcaaaacctttcagcattgtattgacccgccattttccatgcttatcgagaagcgtgagatagcattcatcatgatcaaaagaaagctggtcaacagaattatcaatcgcaatcatatacggctccataatgacggcgttgcgcattatcacacccatcggcattgaaaactgtaaatcatccatcgtcatatcatatgaaagctcaagagggacaagaccgccctttttccaatccgtttctgtaaacgcattcatatttcggccgtcttccctcagcaggatgcctttggagatcaccgtgaccgggtccggattcatcgggtcatcgagaatgttcaatgaagcaagccggcccggaccgatcacaccgagaaagtcatccatctgataatatttcgcgatattaaaggaggccatattgtaggcgtcaatcgccggaaccccttcctccaaagcgattttgattaattcattcgtcatgccgcctttataaaaatgcggcgtcgctccatccgtcgtgtaaaagaaatgatcataatgccggaagcctttttgatggagatcctgcaaaatcgttctcaaatcagggcggatggatgaatgtctgagcgaaacatagtaacccaattcaagccgtctcatcacctcgtcgccattcatcgcctcgtggtcagaatcagccccgaacagtttcatcttcgtcagtgttttttcagaagctccgggaaaatgcccttctatccgcttgcgcagtttctttgtcgcctgcatgcaatgaagcatcaagtcatcgccgtccatgaggcgcggccatccggtcaattctccgccttgaatgacatccggatgctcaatccattgcttgcggacatcaaaagaaaggagctggtcctcattcagcacttcagtctgcagatcatatctggaccaccagaaatattgcaccggctgtttttttagttcttccaatatagtaagcgctttctttttaccgctgtgcaaaagaaaaaacaagttatcattaacaaacgtcgttgttccgaattgagacacatattcggcgagcgtttggggattatatatttgaaaaggatgtgtatgcggttcaatgtaacctggcacaatgtattttccttcacaatttatggtatgaatgtgctctgctgcatcaggaagctcatgaccaacatatacaattcggtctccgtaaatccagacgttctttttcagccattgttttaaaaaaggatttaatacgagagcatcccgtaaaagtagcgttggaagcagctttgagtctacaacatccgcctgtgatctgatgtctttatttttccagttaaaggtacgttcggacattcacatactctccttcgcttatattagacccatcgtatcacatccgcacaattatcgcacggctaaaacgttacaaattattgaagatgaatgaaaaactttttctaagggagctgaaatgatgaaaccgaatatcagtttattaaacgccgttatgcgcatcacttgcggcctcaccattttgtctgccgcttcagcaaaatacacgagaaaaccttggtgcaagatgcatctcttctgtatgatgatgggcgcgatgaaagcggcgtccggcatcctccgcttctgtccggtgacatatatgttccaagccggaatgaatcaggatgacagccatcagcaagaaaaataacaagccgtttcggcttgttatttttttctcctgtcccgcgagtatgagaagaatctgccggcgatcccggcatcacaaaagccgggacagaattcaagactgcatgacaatcttagtcgtcattcagaagaaaacccgcatcttttaagacgcgggggtttcctctttatcgctgcgatgctttcagcgcacgggcgccgatatcgcttctgtaaaacagtccgggttttgtcagccccgaaacggcgctgtacactttatccctcgccgcttcaaatgtctcagcaaatgccgtgacattggcgacccggccgccgttcgtaacaaattgtccgccgtcttttttcgttccggcatgaaaaacggcgatcccgtcttcagcggacgtcaaactgccgatcggcgtccctttcgcatagccttccggatagccttcagaagccaggacaacgctgaccgcggccgtatccttccatcttaggtcaacatctttctcatgcagaagatctaagagcacctgaatgaggtccgattccattctcggcacgacggcctgtgtttccggatctccgaagcgcgcgttgaattcaatgacctttgatccgtcttccgtcagaatcagccccgcgtacagcacgcccgtgaaggagcgcccctctttcaccattgcttttgccgccggcttcacaatcgtttcgactgcgcttctgacgatatcatcggaaatgtgcggcaccggtgagtaggctcccattccgcccgtattcggccctttgtctccatcgaaggcgcgtttatgatcttgagcgatgaccatcggatagacggtctccccttttacaaacgccattaaagaaaattcttcgccggcgagaaactcttcaatgacaacagatgcgctcgcctccccgaatttctcatcctcaagaaaatcgtgcaggcattcaatcgcttcttcttccgtcatcgcgactgtgacaccttttccggcggcaagcccgtccgctttaatgacaatcggcgcgcctttttgctgtacatatgctttcgcctcttcaaatgaagtaaacgtctcgtactccgccgtcggaatgccgtattttttcattaaatccttggcaaactgtttgcttccttcaataatagccgctttttcagacggtccgaaaacaagcagtccggctttttcaaactcgtcggctatcccttcaatcagaggaacttcggggccgataatcgtcaggccgacatgatgttctttcgcaaacgcaatgagtgcggcatgatcgctttctccaatgttgaccagcgtcgcgcagtctgtcataccgtcatttccgggcgcggcgtacaccgtgtcaacaagcgggctttgcgccgctttccaagccaatgtatgctctctgccgccttttccgataatcaatacattcacgcttcgttccccccttaatgtttgaaatgtctgatgccggtgaataccatggcgattccgtattcatccgctttcttaatcgaatcttcatcgcggaccgatccgccgggctggataatcgccgtgacaccggcttttgcggcttcttcgactgtatccggcatcgggaaaaacgcgtctgatccgagcgcgctgccttttgctttttctccggcctgctcaatggcgattttggctgaaccgacgcgattcatctgtcctgcgcccacaccgaccgtcatatggtcttttgcaaggacgatcgcgttggatttcacatgtttgacgactttccaggccagcttcaaatcttcccattcctgctcgctcggctctctttttgtcgggatggtgatgtcggcgtcatcaaatccatggacgtctaaatcttgaatcaaaagaccgccctgtacggaagtcagctgtttttctttctttcctgatgcggtcacgtcaagcgtgagcagacgaaggtttttcttcgccgtcagcacgttcagcgcttcttcactgaaagaaggggcgataatgatttctaaaaagatgccgtgaagggcttcagccgttgcctgatcaacttcacggttcagcgcgatgatgccgccgaaaatggaggttttatcagcttcatacgctttattgaatgcttcctcaattgaagctcccgtaccgactccgcatggattcatatgtttaacggcaacagctgcgggttctgtaaattcccggacgatttgaacagccgcatccgcgtccttaatattgttataagaaagctctttgccgtgaagctgttttgccgctgcgatggaaccggagacaggaagtgcgctttggtagaaaaccgcctcttggtgagggttttcaccgtagcggagcgactgttttttctcaaaagtaacagtgaattgctcagggtctttctcaccggcctcgcgtgttaagtaatcagcgattaatgcgtcgtatgccgcggtatggcggaatactttggccgcaagctcgcgttttcttttgagcgaaacgccgccgtgttctttcatctcattgagcacggagctgtaatcggccggatctgtgatgaccgtcacatcctgatggtttttcgatgcggcgcgcagcatgccgggaccgccgatatcaatgttttctatcgcttcatcgtatgttacgtcttcttttgaaatcgtttctttaaacggataaaggttgacgaccacaaggtcaatcggtgcaatgccgtgttcattgatctgcgccatatgctctttattgtctcttacggcaagcagaccgccgtgaatattaggatggagtgtttttaaccgtccgtccataatttcaggaaatccggtcacttctgaaatgccgatgacatccacaccgttttcctgaagaagtttttttgttcctccggtcgaaatgacttcgacgccgagctctgtcagttcctttacgaaaggtacgagatttgttttatcagaaacactgattagtgcgcgtttgattgtcatgccttttcacctctgttatttagtcccagcagccgtttcacaacgctcggataccatttgtgctcaagctcgtgtattgtatgctctatgtcttcaagcgtatcgttttcctgtatttcgaatgctttttgcgcgataatcggtccggtgtccatgccttcgtcgacgtaatgaacggtaatgcccgccactttcacaccggcccgatacgcctgtccgacagcgtcaatcccagggaatgccggaagaagcgagggatgtatattaataatgcgtcctccgtatgcttcaagcagcgtatctccaatcagtctcatatagccggcgagaacgattaattccgccccgtgcaggcgcagctgttcaataatggcccgttcaaaggccgctttgttttcaaaagatgacggttcaaaggcgaatgacgggatatgtaaagcctccgccctttccgccgcctttgcctgaggcttatccgtcacgagaagcgagagctccgcatcccacttctcttctctcatgcgtttggcaatggcctcgaagttcgatccgtttcctgaagcaaataccgcaaactttttcatgaaagagccgcaccgccgaaagaaatgccttcgccccgcttgacccggccgatcagataagccttctcgccctgagcttcaagcgtgccgatgacgtctgtcaggttttcttctttaacggcaaggacaaaaccgatgcccatattaaagacattgaacatttcttcttctttcagcttgccgtgctcctgcagaaacggaaaaatcggcgggatcggccatgatccgtgatcaatttccgcgctcaatccgtccggcagcatccgcgggatattctcgatgaatcctccgcctgtcacatgcgccatgccgtccaccttaccgcttttcaccgccttgagcaccggcttcacatatattctcgtcggttccagcaattcttcgccgagaggacgcgcaaacggttcatagacagtatccaaatcaagtccgccgtcatcaagaagcacttttctcaccagggaaaatccgttgctgtgaaggccgcttgaagtaagtccgattaagagatgcccctcttcgatatgttcaccggtgacgatttcgtctttttccgcgacgccgactgaaaagcccgcaatatcgtattcatcagacgtatacagccccggcatttccgccgtctcaccgccgataagcgctgatcctgactgctcgcatccgtccgccacaccctgaacgatctgctcaattttcaccggatcagccttgccgaccgccaaataatcaaggaaaaacagcggctccgctccctgggcaagcacatcgtttacacacatcgcgaccgcatcgacgccgatcgtgtcatgcttatccattgaaaatgcgagtttcagtttggtgccgacaccgtctgttccggaaattaaaacaggcttttgatacggaagctctgacagatcaaacattccgccaaaaccgcccaggcttcccataacgccgagccttttcgtgcgctccacgtgttttttcattcgtttgacggcttcgtatccggcttcgatgtcaactccggcatttttataagcatcagacatccctatcactccttgtcaattcgtttctcctaaaaaggcagaaagagaaaggcagcctgaattcccgctgcctttatgtcattttcacattttattttgtcagcaccgcttcttttacgtgaggaagcactgtatcctgataaatttccgtcggatatttgcccgtaaaacaagcgaggcattgtccgcaattggtgtcttcaaattttcggccgactccttttaacaatccgtctacacttaagaaagaaagcgtgtcggcaccgatgatctgacggatttcttccacggaatgagaagaagcgatcagctcctcatgggttgatgtgtcgataccgtagaagcacggatgagcgatcggcggtgaactgatcttgacgtgcacctctgtcgcccccgcttctctgagcattgtgacaatccggcggcttgtcgtcccgcgcacgatggaatcatcaaccatgacgacccgttttccttcgacaacaccgcggacggcggacagcttcattctgacgccttgctcacggagagcctgtgacggctggataaacgttctgccgacataacggtttttaatgagaccgagttcatacgggatgcccgtcgcctcggcatagccgatggccgcagaaatactggaatcaggcacgcctgtgacgacatccgcttcaaccgcggactcccgggcaagcattttcccgaggtttttccgggcgctgtgcacgttaatgccgtcgatattgctgtcaggtcttgagaaataaatgtactccatgctgcagatggaacggttgatattcatggaaaaacgctctgatttcaagccttcatcgttgatgatcagcatttcgcccggctctacctcacgaaggtacgttgcgccgacaacatcaaatgcgcacgtttctgaagcgaccacataagcatcgcccatgatgccgattgacagcggtctgagtccgttcgggtcaagcgctacgatcatctctgtttcagtcatgattaaaaaggcataagcgcctttcagcatagatagcgaatttttgatttgatccttcagcgaaaagtgtccgctgcgtttaatcagatgagccagcacttccgtatcggaggaagtctgaaaaatgctcccttggttttcaagctgctgcttcagctgtgtggcgttgaccaggtttccgttatgggcgagcgcgaggctgccgttgttttgcgaacggaacaggagcggctgaacattttcatatccgcctcctccagccgttgcgtaacgaacatgcccgatcgcgccttttccctttactttgctgagctcgccgttttgaaatacttcagtgatcagcccttggcctttgtgcgccgtcagtttttcgccgtcagtcgcgacaattcccgcgccttcctgtcctctgtgctggaggctgtggagaccgtaatacgtaatttgcggggcttcttcatgtccccagatgccaaacacaccgcattcttcattcaggcctttgatttcagcaagcatggaatagctcctttccacgcgcgctcaagttctttcgtttgcgcgtgaaccaattgttgtccgtcctggttttgaatcgccagaagtccgtcagccgttacctcaccgatatgaaccgcatcagccgcagccgcttcaaacgccgcttggtgttcttttttgaccgaaacgacgaagcgggattgagattcagagaataataatgccgcttccccttcaacagtcacgttggcgccaaggttttccgtcgtcatgacactttctgcaatcgctacgcctaagccgccttcagatacgtcatgcgcggattgaacgaagccttttttaatcgcgtcaagcaatgctttttggcgtgacagctctatatcaagatcgatttgcggcgctttgccgtaaatgcggccttctgtcattttttgcagttcgcttccggcaaactcaggttttgtttcgccgatcacgtatacaagatcccccgcttgtttgaaatgctgtgtcgtaatatgagcggtatcttcaattaagccgaccatgccgataacaggcgtcgggtagatagccgttccgttcgattcattataaagtgatacgttaccgccgatgacgggtgtgctgagaacattgcacgcctcgctgatgccgtcggccgctttttcgatctgccagaaaatttcaggtttttccgggtttccgaaattcagattatccgtgaccgcaagcggttcggcgccggagcatacgatgttgcgcgccgcttcggcaacggcgatttttccgccttcttctggatcaagatataaataacgggcgttgcaatccgtcgtcatcgccagcgcttttttcgtgccgcggattctgagcactcccgcgtcagagcccggagcgaccaccgtatttgtgcgcaccatgtagtcatattgatcatacacccactctttgctggcaattgtcggctgctgcagcagggcaaaaagcgtctctgtcccatcttttacttcaggcgcgggaacttctgtttcctgaaactcgcggtagtacgcgggttctgctgacggtttgtggtatacaggcgcttcttccgccagtgcgtcgaccggaagttcgcaaacaacctctccgttatggcggaggcggagcattttatcatccgtcacatgacctacggaaaccgcttcaaggtcatatttatcaaaaatatcgacaatttcctgttcacgtccgcgttcaatgacgagaagcatgcgttcctgagactcggaaagcatcatttcgtaagcggtcatacccgtttcccgctgcggaatgagatcaaggttcatttcaatgccggagccggctttgcttgccatttcagcactcgaacttgtcagaccggccgcccccatatcctgaatgccgactaaggcgtcgcattggatgacttcaaggcatgcttccaggagaagtttttccatgaaaggatcgccgacctgcaccgcggaacgtttttcttcagatgaatctgacatttcttctgatgcgaaagtagcgccgtgtatgccgtcgcggcccgttttagcgccgacgtacatgaccgtgttgccgacacctttcgcctggccttttttaatatctttatgatcaatcaagccgacgcacattgcattgacaagcggattgccctcatagcttgcgtcaaactgcacttctccgccgaccgtcgggatgccgatacagtttccgtatcccgcgattcccgccactacttcttcaaacaagtacttcacacgaggtgaagtgagttcaccaaatcgaagagagtttaatacagctatcggacgggcgcccattgagaaaacgtcacggataatgccgcccactcccgtcgcagcaccttggtatggctcaagcgctgacgggtggttatgagattcaattttgaacacgaccgcctgattgtcaccgatgtcaacgattcccgcgccttctccgggaccctgcagcacgcgttcgccgctagtcgggaatttgcgtaaaaccggttttgagtttttatagctgcagtgctctgaccacatcacggaaaaaatcccgatttccgtgtagttcggcaatcttccgataatagattcaatgagtgcgaactcgtcatcactgacacccatttgctgatagagtttctcttcttttatttgttctttacttggttcaagcagtagcgacatgagtttccctccaatttttcacgatagaccggaacaatgtaagaccgtctgcgctgccgagcagttcatcgactgcgcgctcagggtgaggcatcatgcctaatacgttgcctttctcattcacgacgccggcaatgccgctgacgcttccgttaatatcgccgccgtatgtgaagacgatttgattgttttcttttaatctttcaagcgtttcgtcatcacagtagaaattgccttcgccgtgggcaaccggaatcgtaatcgattgtcctttttcataggaagatgtgaataacgtatcgccgttctgtacgattaattcaaccgggcggcagatgaactttaaatctttgttgcgtctcatggcgccgggcagaagtccgagctcctgcagaatctggaatccgttgcagacgccgagaaccggttttccttcggcagccgcttttttcacggccggcatgatgtttgcgaatctggcgatggcgccgcatctcaagtagtcgccgtatgaaaacccgccggggatgagcacgccgtcaaatccgtcaaggcttgtttcctcgtgccagacatactcgacttcttcgccgagttcgtcctttacggcgtgaaacatatcaatatcacagttggagccgggtaacacaatcaccgcaaatttcactgtgcgacaacctcctcaacttcatatcggtagtcttcaatgactgtattggcaaggagcttttcacacatttctttcacgagcgcgtcaagatcgcggtcagatttttcgatcgtcagctccatgtattttccgatgcgcacatcctgcacttcattgtaggtcatgctgtgcaatgcatgctgcactgcgcttccttgaggatcgagcacactttcttttaagctgacataaactttcactttatacattatgaaatgcctcccagtcttttgaaaatctcttcgtatgcgtcggttaagctccccaggttccgtctgaacaaatctttatcgagcttttcgtttgtgtctttgtcccacagacggcacgtgtcaggagaaatttcatccgctaaaagcacccgtccctctgcgtctaagccgaattccagcttaaaatctattaatctgaccccgcagtcttcaaaaatatgctgaagttcttgattcacctggtttgtaatcgatttgatcgtttcgacatgctcaggagccgccgcttttaagagccggatatgatcttctgtgatgagcggatcgccgagtgcgtcatccttgtagtaaaattcgataatcggctgcgggagctctgttccttccgggatgccgagacgtttcgacatgcttccggcggcaatgtttctgaccacgacttcaagcggaatgatgctcacttttttgatgagctgctctgattctgaaacacgctccacaaagtggttgtcaattcctttggcgtgcagatgtttgaaaatcaggcttgaaatttcattgttcagacggccctttccgctgatctccgcttttttctcaccgttaaaggctgttgcggaatccttgtagaccacgcggagaatctgttcgtcttcagtttgataaattcgcttcgcttttccttcataaagaagattattgttcacaatattcacggaaggcctcctaacccgaatgttgggaatattcaatctacggcggctgaagaagccgcctccggctggcttcttctataaacctaaacgctcaaagatcaagtcgacgtttttcagatgataattgtagtcaaagcaatcggcaatctgttccggtgtgaggcgggacgtgattttttcctccgcttcgacaagctggcggaacggcacttgtttttcccacgcttccatcgctttcggctgaaccgtgtcatatgcttcttcacgaggcagacccgtgtcgattaaagcaagcagcacgcgctgagaatagattaaaccgagtgtgcggtccatgttgcgtttcatattttccgggaataccgttaagtttttgacgatgttgctgaatcggttcagcatgtaattcagcgcgattgtcgcgtcaggaagaatgatgcgctcagctgatgaatgagaaatatcacgctcatgccataacggtacattttcgtatgccgtcagcatgtacccgcggatcacgcgcgccatgcccgtcatattttccgacccgatcggattccgtttatgaggcatagccgatgagcctttttgtcctttagcaaaaaactcttccacttcacgtgtttcactcttttggagaccgcggatttccactgcgaatttttcaatgctcgtcgcgatcaaagccagtgccgccatgtaatccgcatgacggtcgcgctgtaatgtctgagtggaaatcggcgccgctttcagcccgagtttttcacagacatactgctctacgaacggatcaatatttgcatatgtgccgaccgcgccggaaagcttgccgacttcgatcccttcttttgcctgcttgaaacgttcaaggttgcgtttcatttcttcgtgccaaagcgcgagcttcaggccgaaagtcgtcggttccgcgtgtacgccgtgcgtgcggcccatcatgaccgtgtatttatgttctttcgctttttcttttataatgtcaacaaatctctcaatgtccttgagcaagatctcattcgcctgttttaatagataggaaagagcggtatccacgacatctgttgacgtcaggccgtagtggacccattttctttcttcgcctaatgattctgaaaccgcgcgggtaaatgcaacgacgtcatggcgcgtatcctgctcgatttccaaaatccggttgatgtcaaaagacgcgttttcgcgcatgaccttgacgtcttctttcggaatgacgccaagctcagcccaggcttcacaggctaaaatctcgacttccagccatgcctggtatctgttttcgtccgtccagatcgcggacatttcaggtcttgaataacgttcgatcattatgctcgtcctccgtctcttttcatccatatgttcgtgatgtcctgaatccatgtttcatcaggcttccgcaaaaatgtcatatgccccattttgcgcccttttttaatctcatgttttccgtacaggtacagtttggcttcttttaaaagctccgtatgctcctccgcaagcttcacttcctcaccgagcagattcaccatcattcccggtttgagaagatcggttctgccgagaggaagtccgcagaccgctctgatgtgctgttcgaattggctcgtttcacaaaggtcgagcgtataatgcccggagttgtgaggacgcggcgccagttcattgatcaaaaggtctccgtcttctgtgacgaacatttccaccgcaagcggcccgacaagctccaatttctccgcgagctggacggcaagcgcctctgcccgcttttgaaccgtttcctccgctctcgcgggcacgatgctttggaacagaatattatttttgtggatattttcagcagccggaaaggttgaaatctcaccgtgcaccgatctcgtcacgataacggaaagctccatccggaacgatacccagctttccagtatgcacgtgccgttttctagcagcgcggccgcttcgtctgtctgtccttcttccttaatgacaaattggcctttgccgtcatatccgccgcggcatgttttcagcaccgccgggagccccagtgcctgaacagcttcctcaagctcccgtccgctgtttacgatccgataaggagcgacttgacagcctgctgactggatcgcctttttttccgtttccctgttttgggtgataagcagcagctcgcttccctggggaagatatgcatgttctttgagccagttgagcgcctcgtaatcgatattttcaaattcgtacgtaatgatgtcactgactccggccaatttttgaatcgcttcacggtcattgtactgggcggtaatctcaatatcggcgatctgtccgcatggcgagtctttcacgggatcgacgactgcgactttatagcccatctgttttgcggcgacagccatcatttttccgagctgtccgcctccgataatgccgatgacggcgccgggataaatcgtttttttatcagacaagctgatcactgctttccagcaccgtttgttttgtcgcatttcttctcgcctctagtttatccgcaatgtcaccgtcaaatgccgacaaaatctgcgcggctaacagacccgcgttcactgcgcccgcttttccgatcgccgttgtcgcgaccggcacgccgccgggcatctgtacgatagacagaagagaatcaagcccgttaagcgattttgtctgaaccggtacgccgatcaccggcagtgtcgttttggccgccgtcatacccggcagatgcgccgctccaccggctccggcaataatgacttttaagcctctgtctctggcgctttctgcatattcaaacatcaaatcaggcgtccgatgcgcggatactacctgtttttcataaggaatgtgaagttcgtcaagtatgtcgcatgcatgtttcattgtctcccaatcggaggtgcttcccatgatgattcctgctagcggctgcattctgttcccaccttctcatgctttgtttttcagaaaaaaaagcccggcttatattgcaactatgaggaagcaatacaaaccgggcatggcgcgcgtatcgtcagtcgttcgcttctgcgatatccatgtcagctgtttatcactttcctgcatagtccggccgtttacggcagccgggtagaaacttatgggccatattcccaagattatatgaggtcgtgttttgatttcatgtttatcttaacaacggacttggataatgtcaacgacattatcgaacgatataaaaattctttcttttaatgttcgtgtttagatcaatttcccttcaaatacgatttttttcccgcaaggaacgacttgaattgatccattttctttcttttctgtaaagatcggctcttccatccgccggacgggcatataaccctcttccttcattaaagtgagaatggtgtcaatcgtttcatgttccgttacttcaaaccgtttcttttttggctttgtcattccttaattctcctcttcttcactgctttcacccagaatccgccgtggatcgttttcggctcaaaggcgatgataaacgctttttcatcaagcgttttaatcgtatcatacagctgaagctcatatttgcgcggcgtcagaatctgcatggcggtccggtctccttcaagtccgcccgcaacccagcttgtaacaccgtatcctttttcccggagctgtttcggcaggtccagatcgagctccttcgtaatgacgttgactgttatgtagccgagcgccagtttttcttcaattttcattcccactatgacgccgaggccgtagccgagcgcataggcaatgacgttttgaatttgattcagattgtcgagcacaagactcaggccggtcacatacacaaggatttcaattgtactgatgcctgcggcgaaatagcgctgtccctttaatgtcagaatcatcctgatcgtaaagaaagagacatatataatgttaatgatgagaataatgagaaccatacctatactgttggataaaattgtctgcatcactgattcccctcctctgactttgaaaagccaatctttcaattaaggatagtttaccctcttttcatcattttcaaaagaaaaaaaagcccgccccgcaaggcagactctcaagctcttatcagtgaagctcggcttttttcaatcgtttgacggcttcatattccttctcaagttcactcagcgtgtacccggacagttcctgaacatggtcttgataaaaccctgagcggatcagttttgtcctcaggtgctgttttttccgattaatggcttctcgcaacaacggggccatcttcatcatccctttccgaatcataaagagtagtgccgctttcgaattgctgttgctctcatcatatctcggccgggtcctcaaaacaacacgcttcattagaaaaatttgtaaacattgtgaaagacaaatttcgacttataaaggaatcagcgaagcagtaaagtactcggaaatgagcggccatgtcacagccgtaaaaacgagcatgatgatgaccgccgcggaaatacagtacatcacgtcagccgcaggcttttcagccgatttgtatagaatctgcacaaactgcaccatcgccgaggcggccagaaacaaggtcagcgccgtaaacaccacggtgatgaccggcagattcaatatcgcgaaaatcatccacacgatagagcaggcgacagccggaaccaaaagcgatccgacccccgcggccgcatcccgcatcgtaattttctgcttcatcatataacgtgatacaagccagaccgcgccggccgcagcggcaaaaaagacgagcgtatacacgagaacgacggtaaagccgtcaaaaaacgtatgatgccgctccccgtatccgagaggcctttgctggcttgccctcagctgaaaccaatttccgattgagaaaaagatactgaatacaagcattgaaataagagcatatttaaagcgggaaaagccgtcttccccaacgaccttcaccggtgatgtcaaaatgcgcagcgcgaaacggcaataacgtttgaccgcggcccatgcagaagcgagtttttccgtaaaagccggagccgggcgccgttccttttcttttttcttttgcttttgataacgtcccgcatttctggacattctcgacagcggttcttcatcagttccctgatgctgtttttcttcttccaacgtttcttttctttcttccgtcatgtcagcaactcctatcaaaaaaatacggcggaatttgtttagcaagaaaataaaacacttatataaggtaccgaagcggccttaaacagtcaagcggttttcttcacccggacacccacatgacgttttatattatgtattggttttacggaataggacaaaaacaaaaaaccggctttccccagccggtttttccgttatttcaagaagatgaaatacaggataaagatgacgaacagcccgtacataatcgggtgaacgctttttccttttcctttgcagatcattgtaatcgggtagaaaataaaaccgatcgcaatccccgtcgcaatactgtacgtcagcggcatcataatcatcgttaaaaatgccggaacagccacctcgaatttatcccaggcgatcttaccgagcggcgccaccatcagcgcgccgacgataattaaagccggagccgtcacattcgtggtgacaactgacagaagcggcgagaaaaacatcgccagcaaaaagagaatgcccgtcacaacagccgcgaagccggagcgcgcccccgccgcaacgcctgagctggattcaacataagaagtcgttgtagacgtaccgagcacggctccgataacgattgatgttgaatccgccaaaagcgctcttcccgcacgcggaagtttgttttccttcatcagcccggcctgtgtcgctacagctaccagcgtaccggccgtatcgaaaaatccgacgaacaggaaagttaaaatgacaatcagcatttgtacggagaagatatccggaaggtgcatccacgcctgtccgaaagtcggcgcaagactcggcacgctgccgacaatgtgtgtcggaaccggaatcagcccgcagatcataccggcaaccgccgtcaaaagcattccgataaacacgccgccgtttacgcgaagcaccatcagaatgaccgtcacaataacaccgaaaaccgtcagcagcacagggccgctgtgaatattgccgatagacaccaaagtcgatgagttcgcttcaataatgcccgaaccctgcaaaccgacaaatgtgataaacaaaccgatacccgcgccgaccgccaatttcagctcaggcggaatcgcattaatgattttttcccgcaatcccgtcagtgaaagcgccacgaagataattccggaaatcaagacgccggaaagcgcagcctgccatgaaatccccatgccgagtacgacagagaaggcaaaaaacgcatttaatcccatacccggcgcaatcgcgatcggatactttgcaataagccccattaaaatacagccggccgcagatgccaaggctgtagcggtgaacaccgcgccctgatcaatttttaatgcttcgggaaatcctttcacaccgtttaaagacaatgtcagcggattgacgaacagaatgtacgccattgacaaaaaggtcgttaaaccgccgatgatttcattacgatagcttgtccccagctcatcaaactgaaaaaattgcttcaagccaattgcctccttcattctctcccatttattctgcccgttatccgccaaataaaaaacgccccaaatacatttgggacgcttgactacatacgttcagtctgaataaataagaatggattatttatatcaaacgattgagattgatccgtagtcaagccatttacggtagcttggtagaaacttgcgggccatatccccgccattatacgatatctgcatatttgatttctgagtctattgtatcaattcaattttgaaaactcaataaaaaaacgaacaatccagttaaaaaaaattggtttattcgttaattgaccaaaaatggaagacggcaagggccgccttcccggcatcattttccgttcgcaggccgaaccggcaccgcgaatgtgatccccttgtcatccgccagcaagttcataaccgtttgattgacgtacaaagcatatgaatcgaatgagaaatcgcgcaatgaatagtctttatcggatgaatcatctaattcaaaaacggattccatttcaccctttttaagattcgtgactttcgccttattccctttcagataatagcctttttcatactcattaagcgatggccaagttttcatttttttcgtattgccgagaccgattgattcaccgacattcatcagctgatctttatccgctttgctgtaattaattcctgtgaattgataatcgacgatcacccgtctgtcttgctgtttgatctttttgatggtaatgccgacatgatgatgtttcgttttataactgacgggcagttttgttttcagaggcacgatttctcccggctctgattctgtttttatatcacccgttatgaaaagtgttttcgctttcgggtctatcggtttgctgaattgagtttggccgcgtattcttttcccgccgccgggaagattcttcctgccgccaagttcaatattcgacatcgtcatttcataatggtttccagcatcatccgttgcttcgtcaatcgagatggcatcatttttggctgcatcatagaagtcgatagaatacaggagagccgatcccatcgttccgttttccgcccggatatcgaaaaagcggtataatccgtgatttacattcacagctttcgttccttcaagagaaacggacttttgttttttaatagggagtgtaaagcgccagtttccggggatatccttgatttgtgtaatgacaagcggaagcttatcaccgtctttcagctttgagccgtccgtgaacaggcgaagctgccccgcgtaccgcccgtctttcatttttttcatatcactgctgtcataatcctctgctaacatattccgtggatctttataatcgacttgaaaagagatgctctcctcatctgatttcaaattatcaacgataaagttataaacgagctgtccgctgtcgtaatacacacttttcactgtcaccgtgattccgcgtgattccgctttttcgttcagttttgtcaccaaattgcttttaaacagcgcagaacctgccttatcctgaaacagactgtaaatttgtccggcaacaggaatgtttcccatagcggtgttaacggagggcatgaacaagcctgaggacagatacagaataaacagagcagcagcaaccgcgaggccgtttatcacttttcgtccccatctccgtctgacggcgccttcttttccggcacggacagcagcgctgtgtatcacgtttttcaactcagctttcggcacgtcaatgtcctgatacaattgcttcatttgatgcttttccatatgtgtttatcctccttttccagttcctgcttcaatgcttttctcgccctgtagagatgcgtttttacagtgccttccgccataccggtctgttcagcgatcataccaatcgagaaatcttgaaaataataaagctgaatggtcagctgtatatgttcgtcaagcgtttccagagcattccgaagatctatgtattcttcaatattcttattctccgcgcgcgtatcgtgctgcggctcaaacggaatgacgtctccgtgctttttcctcatcgcaaaaatcgtatgaagcagaatccggatcagccacgttttaaaatatttcggctccttcagctgtgcgatatgaagaaaagccttgtaagccgtttcctgaacagcgtccagtgtatcttccttgtgatgcaaataaagataagctgttttatataaagtctcctgatgggttgtgatcagtttttcaaaggctgcggcatcaccttttttcgcctttttgatcaatcgttcttccttcaccttatccacctcctatgctgttagatatgaatcggggcaaaacggtttcaaaaagatgaaaaaaaacgcctcttttttaaaagagacgttttttatcttcatttattcccactcaatcgttgcaggcggcttgctcgtaatgtcatacacgacgcggttgatgtgtttcacttcgttgacgatccgtgttgaaatcacttcaagcacatcccaagggatacgcgcccagtcagatgtcatgccgtcaattgatgttacggcacggataccgattgtgtaatcatacgttctcgcatctcccatgacgccgacgctgcggatgtcaggaagaaccgtgaagtactgccagatgtcgcgctcaaggccgtggttcgccacttcttcacgcagaatcgcgtctgattcacgaacgatttcaagtttttcttccgttacttcaccgagtacgcggatgccaagtccagggcccgggaacggctgacgccatacgatatcatccggaaggccgagctctgtgccaagcgcgcgcacttcgtctttgaaaagggtgttcagcggctcgatcagttcaaactgcatatcttcaggaagtccgccgacattgtgatgcgatttgatcgtttgcgccgttgcagtaccgctctcgataatatccgtgtaaagcgttccttgcgcaaggtaatcgatgcctttcagcttgtccgcttcatcatcaaatacgtaaatgaattcgttgccgatgattttgcgtttttgctcaggatcagaaacacctttcagcttgtttaagaatctgtctttcgcatcaactttaatgacattcatattaaagccttcgctgaacgttttcatgacgccttcagcttcgcctttacgaagcaggccgtgatcgacgaaaatacaagtcagctggtcgccgatcgctttatgaattaaagcagccacaacagaggaatcaacaccgccgcttagcgcgcaaagaacctgcttgtctccgactgtttcgcggattttttgcatttcgatttcgataaagttttccattgaccattcgcctttacattcacaaggcccgaagacaaagtttttcagaaggtcatttccgtattctgaatgacggacttccggatggaactgcacaccgtaccattttttgtcttttttgctcatcgccgagttcgggcagtgatggctcgtcgcgtctaccgtaaatccttccggcacttgtacgactaagtcgccgtggctcatccagacaacttgttcttccggaagatccttgaacaagtctggagttccttgaatctgaatgttcgcttttccgtattcgcgctggcttgccgcctcgactttccctccgaggtaatgagtcatcagctgcatgccgtagcagatgcccaatacaggaatatcgagttcaaagattttttcatcacagcggaaagatccttcatcatatacactgttcggtccgcctgaaaggataattccttttggattcatttctttgatttcctcagctgtcaacgtatggggatgcagctcgctatatacgccaaattcacggatccggcgggtaatcagctggttatactgactgccgaaatcaagaacaagaatcatttcattcactaacttcgtcatggttgtcacctaatctcctctaagtttttgacacagaaaaaacggaggacacacgttcagccctctgtcggcaagacttgtccggaagcccggctttttaacgctcccgggctcccatttaacattcatatattctaacaacaggacgatatgcggtcaagactatcttcttttaattatattttcccacaactgtcccgattcattccaaagctttgcggcattatcgctgcggtataaagcacgctcatagcgcagcgtcagctcggacatgtcgtttgtatggtgcgcctcatcaacccttgcggcaaaatcgcggagcgtttctccgtctcccctgctgaacccttttcgtttcagctggcggagcagcgcggcatatgcgtcgaaaaagacgtcttcatccgttcgccgcttcaatccggctgctgtaacgtgcggaatccagcgcacccggaacagccaggcgagtgccgccgcggctgaaattacgatgacgatggctgcatacggccacaggtgtgccgcggttttgttgcggatcacaggctgcggtgccgcgctgtgatcccgctttttcggtgtttcttctttttccggctttgtttcctgacgctgcttgtcagacggtgaatccgaattccccgctgagcctccgctgtcttttgccgcggtatgattttgctctgacgtaaactccgtcggattggtgaagccttttgtcggctcaaacgtcacccagccctgatcgggaaaatacacttctacccacgaatgggcgttgttgtttgtgacttcataaatgtggccgttatggtcgcctgcccctttatattcaccggatgtatagcccttcacccagcgggcgggaattcccgcagagcggagcagcacggccattgccgatgaaaagttatcacaatatcctcttttcgtttcaaacagaaattgatcgacataatcctgattgtgctccggaaccgcgacatcctgtgtattatacgaaaatgcggaagatccgagataatcctcgatcgccttcgctttatcgaacatattatgatgatcccgcgtcaatctgtccgcaagctgtcgcactcttcccggaaggctgtcggggacctgtaaataccggtcattgaattgattctgctcacggtatcgtttcactttcacttttctgagatcattcagcttaaagacgggcgcctgaaaagtcaccgtgtaccgtcccatattgcggatgttgcccacttgttcactgaccggcgtaatttgctcggtgtttccgttcatttcaagctgaatcgagtgcttcggtttaatattggagacgccgatcggatacatgacgtgattatagagataattctcatcaatggacacctgtgccgtataccgtctcgtctgcacactccggtcaaaccatatatcttccacattgccgccgttcagtttataggacatgccctgatcggtctccacccagcctttccccgtgtatgtatctttcgtttccacccggaagtacgcccgttcttttcccttccatgtaaaaaccggcgtatcatcctcctgaaaaggaccgcccaatgtttcatcatgattgccgtagccgattttactttcggcggcgggcacttctttgtggtttgtgattttttttagaaacggcacgggatccggccagttcgggtctgatttcggagccgccagaccgaacactacggaagcgcagataaacagcatcagcggcagaaaccatttgagtatcaatctttttttaaacgctatgtgttccgtaagccggatgcgctccatatacaaaagccccatcatcaaaaagccgataaagacgatccggatgacggcgtacgcggcatcataaggagtaaacgtatcaagcacggtgatatacgccaccgtcatgataaaaaagaataatattttccgctgatagatcacccagtaatgcagcaaatacacgagcagccataaaagcacaaaaaacagcaacgtgcggaatgacggattcatatcattccatcttccggttccgatgtggcgggcattttgcatcacgtcccgcaaaaaagaaacgagccattccggctgaaaaatagaacctttataaaacaggatgtgaatactgatcaacgtaaacagaatgcaggacggcacggtcacgtaccacctcatccggaagaatgacagcagaaatgccaaaccgataaaaacgatgaaaaaaccggtatgttttgtatccgtaaaattgtgcagcggcctgagccattcccataacaataaaaaagcgagaaaataaaacagcagcagactcagcctgcttccctggttctcgtcatgcggcatggcgcgccacctctctttctaaacaacatgggacacccgtttgtccctgatcatttgcaccttaatatttttctgagcgaagatgagagcgagtttccgttctttctccgaaagcgcggcattcgtttctttcgccaaaaacaccgtcatgtcagcacggccgggctcagcctgtttgagaaggtcttctgtaagactgcccgtcacgacggcaatggaagctttacccagttctttccctaaacgcccgcctgcatcggcttcttccgactctgaagctgatgccaggtaacgcagcatctgtctgaaatgccgctctccctcccggacgggaaatacagtccggtcgctccccaatgaaataaatcctgcgggagagcccttcacaagcgccgtgtaaagcagggatgccgaagctgacaccgcggcttcaaacgaaggggacggcctgcagtccaaaaggagaatcatattcatactctgcaacgggtcaaattccttcgtcatcagctcatttcgacgcgccgatgttttccagtcaagtgcggaaaaccggtcgcccggctgataatttctgacgctcgcagccattgctgtgcggtgtacctgaaacggagcgccggcacccgcaccctcttctccggatgcagcctgcggcttatagtgaacaggcccgtacgccgggaaaaccagaaccgtatccgttacggaaaacgacgccgtcttgtccaaaagcccgagaacatctcccgtccgaactctgatcgtatgtaaatgatgctctccgcgcggcacctgcggcagctcatattgtaacgtcatcttcctttgaaaccacggaaacacaagctgtttcgcactgcgcctctcaccaagcgtttccggcatcacatcttcaatgaccatatatgtcagcggaaacggcaggcgcctcgtcagcctgatggtggcagacagcctgtcgcctgaggttaactgggcggaggacacgtcacgcgtcacctgaaacgcccgcaacgggtacacagcgaccagcccggcgtaaacggtaaacggcaaaaacgcataaaataaaaaccagctcacaaatccgccctgaaacatggcataagaaaagacagccgccgtcagtacggccaacataagcagcttccagccatatagaagccaatgcatcttctttctcattagcggaccgacatcctttgaacgggaactttttccgtttgcatgatgtcttctataaccgcttccggcgtcacatcgttaaatttcgcctcggcggtcaagatcattctgtgcggcagcgtatacggagccaaatactggacgtcatcaggaatgacgtaatcgcggtcatgaagcagcgcgtacgcctgcgcggctttcattattgaaattgaaccgcgcgggctgacgcccagatgtacggacggatgccggcgggtatgctgagtaatgccgacgatatacgctttaactccatcatccacccgcacctgctccagtttttgctggagggtgatgaactgttctttagaaatgacgggctcgattgtttcaagcggattgcgcccttcctgcaaagacagaacccgaagctcctcctcggcagtcgggtagcccatgcgcagcttaaataaaaaccggtcaagctgggcttcgggaagcggatacgttccttcatattcaaccgggttttgtgtggccatgacgaaaaacggctcagccagccgcattgtctttccgtcaatcgtgacattcccttcctccatcgcctcaagcagggaagactgagttttcggagaggttctgttaatttcatcagccagcacgatattccccatgatcggtcccgggcggtattcaaattccattgttttcgtattataaatagagacacccgtcacatctgacggcagaagatccggcgtgaactgaatcctcttaaagtcagctccgatcagcttggccaaagcccggaccatcatcgtttttccgactcccggcacgtcttccagcagcacatgcccttttgcgagaatggcggccagactgagtatggcgatatcccgttttcctatgatgatgttttcaatatgctcaacggctttctccagcagcggatgcagctcttctttataagccattcttctcctcctagtcatctctcaaatttcaattatcgtaacctaactttaccacaaaatataaacagtataaaaaaacgtttccagcgaattgtttccagtccgaaaaaggaaaaaagctccctttagaaaggaagctttatttcagctggagaggctccatatgaacgtgtgaatggtcaatggcatgttcctctttcatcccggcgccttctgctgtacgaatgcgaaaaaaatgtcatattttcttacatcattttcaactgtctgtggcatttatgatagaataatacttgtctgaatattcagcataaacaaaccaaaaggaggcaaagaatgaatcagcctaactctttatctaagggattaaaaacccggcatatgaccatgatttcaattgccggcgtgatcggcgccggattatttgtcggaagcggatcagtcattcattccaccggacccggagcgattgtctcctacgctttagcaggattattagtgatttttattatgagaatgctgggggaaatgtcctccgtcaacccgacaagcggttcgttttcacagtacgcgcatgacgccatcggtccttgggccggttttacgatcggatggctgtattggtttttctgggtcatcgtcattgccattgaagccattgcaggcgccggaatcatacagtactggttcccgggcattccgttatggctgacgagtctgcttctgaccgtgctgttaacactgacgaatatttattcagttaaatcgttcggcgaatttgaatactggctttccttagtgaaggtagcgacgatcgttgtcttcttaatcgcgggatttgcgttcattttcggaatcgttcccggcagcaagccggtcgggctggaaaatttggcgggcagcggcggatttttccctaaaggtccaagttccgttctgctcggcatcgtcgttgtcattttttctttcatgggatctgaaatcgtcgcaatcgcagcgggagaaacgtcaaatccggtcgaatccgtcacaaaggcgacccgctcagtcgtttggcggatcattattttttacgtcggctccattgcggttgtggtcacactgctgccatgggattcagccaatattttggaaagccccttcgttgccgttttgagccatatcggggttcccgcagccgctcaaatcatgaatttcatcgtcctgacagccgttctgtcctgcctgaactccgggctttatacgacgtcacggatgctgtattcactggcagagcgaaatgaagcgccgcggcgttttatgaaactgagtaaaagaggcgtaccggttcaagccattatcgccggcacctttttttcctacattgccgttgttatgaactacttttctccagactccgtatttttgttcctggtcaattcatcaggggcgatcgcactgctcgtctatctcgtcatcgccgtctcacatctgagaatgagaaagaaaatcgaacggacaaaccctgaatctcttaaaatcaaaatgtggttctatccgtacttaacctacctgacgatcatcgccatttgcgccatcttgttatctatgctgtttatcagttcaatgcggtctgaatttctgctgacaggatttattactctgctggtacttgcctcatatgtattccgcaaaaaacaaaaaccgaaagagagcgcttccgaaagccgggttgcgcaataaccgcaaacacccccctcaaaaaagggcgggtgtttttttaaccaacctgttccaggcagcattaactgtagtacaggatttcaataaatgataaggacaggatgaaaaatggcactagaaaaatttgcagatgaactgccgattatcgaaacactccagccgcagaagaaatcagacggcagcacgtattacgaagtcaccatgaaggaatgctttcacaagctgcaccgcgatctcccgccgacccggctttgggggtataacggtttgtttcccggcccgacgatcgacgtgaacaaagatgaaaacgtctatattaaatggatgaatgacctgccggataagcattttctgcccgtggatcataccattcaccattcagaaagcggccatcaggaacccgatgtcaaaaccgtcgtccatttacacggaggagcaacgccgccggacagcgacggctacccagaagcctggttcacaaaggattttaaggaaacgggtccttattttgagaaagaggtataccattatccaaacaaacagcgcggggctctgttatggtatcacgatcacgccatggcgattacgaggctcaatgtgtacgccgggcttgccgggatgtatatcatccgcgagcgaaaagaaaagcagctgaagcttccctccggagagtacgacgtaccgcttatgattttggaccgcacgttaaatgacgacggttccttgtcttatccaagcggacctgctaatccttccgaaacgctgcccgacccttccatcgtcccgtttttttgcggaaataccattctcgtcaatggtaaagcgtggccgtatatggaagttgaaccgcggacatatcgtttccgcatccttaatgcctccaatacgagaacattttctctctcgctcaataacggcgggaagtttatccaaatcggttctgacggcggactgcttccccgctctgtcaaaacacaatctatcagcttagccccggccgagcggtatgatgtgctcatcgatttctccgcctttgacggagaacatatcattttaacgaacggcaccggctgcgggggcgacgtcgatccggatacagacgccaatgtgatgcaattccgcgtcacaaaaccgctgaagggagaagacacaagccggaagcctaaatatctttcaacaatgcctaatgtaacatcaaaaagaatacacaacatcaggacactgaaactcacaaatacgcaagacaaatacggccggcccgttttgacgctgaataacaagcgatggcatgatcctgtgacagaagcgccgaagctcggcgcaacggaaatctggtcgattatcaatccgatggggggaacccatccgatacacctgcaccttgtttccttccaaatccttgaccggcgtccctttgacttagagcgttataacaaattcggcgacattgtgtatacaggccccgccgtcccgcctcctccaagtgaaaaaggctggaaagacaccgtgcaggcgcactcgggggaagtcatcagaatcgcggcgactttcgctccttacagcggacgctacgtatggcactgtcatattttagagcacgaagattacgacatgatgagaccgatggacgtcacggataagcagtaaacaaacatcccccctttctccagaaggggctttttttatttatccaaaaagaaaaaataagaaggcgcttttttgcatatactgtaataacaggaagacgatgcaccctcattggaaatctggatagaaaaaggaattaggagattagggaaaagtatgagacaatgaaggagtgcacgaaaattcataagggaagaagtgactttatgtcttactacaacaaacgtaatcaggaaccgctgcctaaagaagatgtcagtacgtgggaatgcacaaaagaggactgtatcggctggagcagaaagaattttgccggcagtgataccccgacttgccccctttgcggcagtaaaatgatcgacggcgtccgttcgttggtaaatctccaaaacaataatcaaacggcatcaagttagacctcccttttacgagtctcaacatagagaaggcctccatgtctcatgagaggcctttgcgttatcatgtccttttatgatgcaaaggagcaatgaacatgaaaaacgatcggcagcagaaagatctgaaggaaatggcaaaacggcggaaaatgaaccttgccgcacagtcattcatcgaaacgcttcattttgccgttccgattctccgttttttcaaatggctcgcctcagccgcagccagctttgttcatgaaaaaacacccagcgggcgctgagtgtttttttcatgattggatgacggaaaaactattgataatgccgtggtcattttcccagactttttcgcattttttcgtatccaaatgataagcataaatggtccggaccttcgcattccgccccgtttcatccttcagacgcttagcgccttttgcttccgccatgaaataaatgatgctgccgtctttagaaaactgaggctgggcatcaatcagcggagcgaagtccttcccgtttgagataatcgttttatcttttttcgttttgacattcatcagacggatggacgctttttgttccgtccctttttgtgtataagatgtaaagacaaggttctttccgtccggtgacaccgccacgccgctgataaactgttcaaggtttgtcaggtcctgaaggtgttcgccagctcctgctgcaaaccggatattcgtcggttcagggtcaatccccttctcatttgcctcatccgttttttgataatcctctttgacggaataatgcagaagcgcaaaatcgttttggctgcggttataaaagaagctgcttacactgtcgtctttctcatcggcggcaggatacagattttcataacgtttcgttttcaaatcaaaagatgcgagacggaaaatatcttcatccgcttttccgagacggaaataaatgtgcgtcagatcctttgataaaaacagactgtcagcgcttgccgttcctttataaagcaccgtcttctttttcgtcttcagatcaagcttatacagacgcatctcattttcgtcattattcccgacaaaatagagcacctgatgggcgtcatccagcgcaaacgccggatatgccgaaagcttttcctcgtacagcacgcggccgtcctcgtaatatttcgtcatcagatctttgtctgtaatggaaacaagcagcttgtcatggccgccggagacaacggcttttccgccgccgtcgctttttcctttgatcagtaaaacggacgcgatgaccgccgccgccaaaacggcggcaagcaacatccagatccatcgtttcttcttcattatcaatctctccgtcaatcagaaaaagcaagaatcagagtccttgctttttaagatggtctattttaatagctgtagtgtccggatactcttcctttgcttaacggatatccgagcgctttgaacgctttcgggctgacatccaatacggcattcggcagacggcctacatcatttttatatactgtgataaccttttttggttttgctttcgcataagctctgattttcgttccgtttctcggaacgtcaaatcctaattttgtcgcgcaatcccagtgtcccagttttttaccggaagatccttttttaccgactccattataccatgtaatatttccgttcacttttttagcacttgcatcagaagagaaactgatcgctcccagcgtgcttcctgctaaaatcaataaggctaagaataacttcttcaagctttcgtcctcctgattctttattctaggcaaaattatacaccaagaagacgattataatatttcaatcactttacatgttcattacaacgtgatgagacatgcacataacgacggcacaattacctgttctatataattccatggtaaattatactacaaaatttaattcattagcgttataatattcatagagtatttctgcattcaatatggactttttataaggcctattgatagttgcataatatgatatattttgagaaatcaggctttaggaagcactttattccttttaaccgtggttcatattgatcatgtacctatactcgtttcaatcagactaggagtgataatcaatgaaagcggcaagatggcacaatcaaaaagacattcgaatcgaaaacattgatgaacctaaagcagaaccgggtaaagtcaaaattaaagtcaaatggtgcgggatttgcggaagcgaccttcatgaatatttgggaggcccgatctttattccggtcggcgaacctcatccgttaacaaacgaaatggcgcccgtcacgatgggtcacgaattctcaggagaagtcgtggaagtgggcgaaggcgtcaaaaattacagcgtcggcgaccgtgtcgtcgtggaaccgatttttgccacacacggacatcagggagcctataaccttgatgaacaaatgggattcttaggcttagccggaggcggcggcggattttctgaatatgtatccgttgacgaagaattgctgtttaagcttcctgaagagctttcttacgaacagggcgcgcttgttgagccgtcagcggtagcgctttacgccgtccgccaaagcaaattaaaagcgggcgacaaggcggcagtttttggctgcggaccgatcgggctgcttgtgattgaagccctgaaagcggccggcgccacagatatttacgcggttgaactttcaccggaacgtcaggaaaaagcgaaagaactcggcgctatcatcattgatccgtcaaaaacggacgatgtcgttgaagaaatcgctaaacgcacaaacggcggcgttgatgtttcttatgaagtaacgggcgttcctgtcgttctccgccaggcgatccagtcaacaaacattgccggtgaaacggttatcgtcagcatctgggaaaaaggagcggaaattcatccgaacgatatcgtcatcaaagaacggaccgtaaaagggattatcggataccgtgacatcttcccttccgttcttgcactgatgaaagagggctacttctcagcagataagctcgtcacgaaaaaaatcgtgctcgacgatctgattgaagaaggcttcggcgctttaatcaaagagaaaaaccaagtgaaaatcttagtcaaaccgaactaaaccgttcagctgaatatcagacacatccgaaaaagagccgttccggctctttttttcatctcatcgtctttccttccttttccttttaaaaatgatcccctctgcgcaaactatttttcaccctgtcccgtctatccttaggcagcagcctatgatacgtattttttaaaaaggagccctttgaagcaatgaagaacgaaacagccaaagcgtcgcttgtgacgtgcataactgagcgcaaggaagacttttaccggcttgcgtacagttacgtaaaaaacaaggatgacgcgttagatattgttcaggaatcaattcaaaaagcgctgacatcggtcgaatccgtcaaaaaccccgatgtgatcaaaagctggttttataaaattttagtgcgcacggccattgattttctccgcaaacagaaaaaactgaaagtgatggatgatgaaacgatcgagtttttaagccgaggaaaggaagatcactacaaggacacagaccttcacgaagcgcttgatgacctgccgcatcaatataaaaccattatcattctgcgtttctttgaagacctgaaattagaagaaatcgcggacatcacgggggaaaacatcaacaccgtcaaaacacgcctttacagggggctgaagctcatgcgcattcagctgacgaaggaggatctttcttaatggaaaagagattagaacaattaagagaagagtataaaagtgtgcccattcctaaggaactggacagcattgtcgaaaaagcccttcagcaaaaaccgaagaaaaaacgaatcgtgatgtggccgacatccgcggcagtcgctgcggccgtcttatttaccgccgttgtcaatatcaacccggatgccgcacaagccatgtctaaaatccccgtcatcggcaaagtcgtccaagccatcacattcacggagatgaaggaagaaaagaaccaatcaagcattgatgtgaaaacgcccgctctgtccggactttccgatcataaactcgaagacagcatcaaccggcattatatgaaagaaagcaaagagctgtatcaggaatttatgaaggcgacctcaaaaagcaaaaaaggccacctcagtatttacagcgattatgaaaccgttactgacacagcggatctgatctcaatccgccgtgatatcgaaaaaacgcaagcttcatcttatacgcaaagccgttacatcacgattgataaaaagaatgaggccgtgcttacgttaaagagtttatttaaagatgaccgttatattaaagtcatcagcgaaaatattaaagaacaaatgaaaaaacagatgaaagaagatccgaataaaatatactgggtcgaagaagatgatatgacggagccttttaaagccatccgcgccgaccagaatttttatattacagataagcacaaacttgttatttcatttgatgaatacgaagcggcacccggatatatgggcgttacagagtttacaataccgacctccgtcatctccaagctgcttgtcggagaccgctacatcagataaagaaagaaaaaaatccatgatatccgcagatcatggattttttctttcgtcccgcaacagccaagatgcataagggacccttttcatataacagacgccggactgggactgaaaagtttaagaaaatcacagcatttcatacattttttctgaaacaaaatccccttccgaatgcgtctaattaacggaacaaatggaagactgtacagaaatcagctatagctatccgcaaaacagcgagaatttccgcacacattattggaggaataccatgtcagacaagtcactgcatcaccgctatattcccggactggatggacttcgcgcctttgccgtcctcgcagttatcgcatatcatctgaattttaactgggccgacggcggtttcattggtgttgatatcttttttgttttatcggggtatttaattacatctattatattgcctgtccaaggcaatgccatcacccttgatttgcgtgatttttgggtgcgccggatcagacggcttctgccggcggcttatctgatgattatcatgacggtcatttgggtcgtattgtttaacagcgagctcctgcataccgtacgcggagatgcggtctcctcacttttttacataagcaattggtggtttatctttcatcaactttcttatttcgacagcttcggctccccttcgccattaaaaaacctttggtcgctggcgattgaagaacagttttatatcatatggcccttcctgctgcttgcgggaatgtacatatgtaaaacacgggcccggcttgcggccgcggtcatgttcctcgcgttatgttcggcagtcgtaatgagtatgatgtatgtgcccggcggagatccgagccgcgtttattacgggacggatacccggtcatttgaattgctgatcggctgcgctttagctttagtgtggccgatgaaacgattatcttccaaacggctgccgagcagcatgaaacacctgcttcacgggacggagcttgccgcttttgccgcgctgctgctttgcgtcttttacacggatgaatatgaacccttcctgtacaagggcggcatgcttttgatcagcatcaccgcagcggttcttgtcgcatgtttatgccatccgagcagctttttgggacatgtcctttcatggaagccgcttcgctggatcggaacgagatcatacggaatctacctttggcattacccggttttcgtactgagcacacccgtgcaggaaatcggaaatccggtttattggcactgcgccgtcagaatcggcgccactttcattcttgccgagctatcttaccatttcattgaacagccgatccgcactgcgggcttccggccatttttacgccgcgtgtttctgaaccgctttctggaatggaagacgtcctctgtcatcagcagaatgtcgctcggcctcattcttgccgccattctcgtatttgcgggcgggctgtcagggatagccgaagagaaaaaacagccgcaatggacgtacgcgcagaatgatcagcaagaaaccgccgcctcttcgcacaaaacggccgatcacgatcagcctgcaaaagaagaagacagcaagaaaaaacacggcggcgaaaaaacggataccgcgtcagacaaaaacaagaaagaaccagcagacaaatcagatacgaagaaaaacgacgagaaaaaggaacggtcatctcaaaaaacggctgatccaaaacaaacacagcctcagcaagacgtgctggccatcggtgactcggtgatgctggacattgcgtcatacctgcggcagtccctccctcatgtcaccatcgacggaaaggtaggaagacaagtctctcaagcactccagctcacttcggaatatgcgtcatttaatcagccgaacaaagcggtcatcatcgagttagggacgaatggctatttcacaaacagccaaattgaatcactgatcagctccttttcaaaagccgatatctatcttgtcaacacgcgtgtaccgcggcagtgggaaagcaaagtaaacgaatcattgcgccggcaggccgagtcacgcaaaaatgtgacgcttgtcgattggcacgcaaaagcattgcagcaccctgaatacttcacaccggacggcgtccatctcatacctgagggatcaaaagcgctgacatccctcatcgttcaaacaatgaaatcatgacaaaaaaagaggccccaaaaaggcctctttttcgtatatcatcaggcaagtttctgtccgcaattcgggcaaaaattcgcgccttccgttttcgttccgcagttcggacagaatttcggcttagccgctccttccgagccgtttgcctgttcggtcccctgattctgctgactttgattttgctgcggctggttctgctgattttgattcatttggttcatcatttgatttgccacattcattcccatcatcatgcccgccatgtctgaggcggcgccgcttccgctcattttgccggatgacatgccgtccgtcatggaaatctgctgatagcggttcacatcgcccaccatgccgtaagaagcgtttttcgtaatcatatcctgaacttcctgcggatagttaaagctcataatattgaagcccgtaatcgacatgccgtctccgatcagctgcatatcaagatcttcttgaatcccttttccgatttcaaatgaattcgactgcagattgaacatgtcttttccttctctggtgatccatttcatcaaaagctgatcgagaatagacgtaatccggattttaatgtcctctactaaatagctgtctctgacacccgcaatcttatcaatcaatccgatgtagtcaatgaccttgaagttaaatgtgccgtttgcgcggatcggcataccgcccggcatacctgccgccggaatgttgatggcgttttttgtgccccacttcacggtgaactccttcgtattcacaaacagcacttccgcccgcatgccgctgttaaagccaaacttaaacccttttagtgtcgatagaaacggaatgatttctgattcgatatcataatcgccgtcatcacggaaaatcccttcaatcttcccgttgtataaaaagatggcatcctgtcccggccggatgatcagacggctgccttttttaatttcacggttgttccatttatagaaaaccatgtcgtctctgaattcttcccattccaccacatttgctaactgatttctgaaaaaacccatgtatgctcaaatcctttacatataatttaaaaacttcccttgcttccgctgtaactcgtgccgcccctcgtgactccgccgtcattgtcattatctttatctggctttttttctcttgtaatgtcggttcggatatatgtgtcgtgctggctcagcacttcagacgtatcgtgatccatatacgtgctgccggtgacggtgaccttgccgccggaattgtacaccatcacggtgacggcgattccggccgctgctgcagcgataatcagctgaaaccaccatgtgagcagcagattgtcagacctgtcgtccgggcttttccccatatctttataagccatcttgatgtaagtctgaaacgccttttcataatggcctgcggaaatatctgacgagatcgtatttctgatcgtattcagccggctgctgttcaaatacgtctccgcctttttatatccggagagaaatacttcccgatccttcatatcaatagtcaatatcgccgtgcttccgctaaaatgactgtcataaaaatcaccggcatactgttcgatctccttaccgcccgttccgtttgcggtaagaatgataaaatcggtatggcgcttttctcccagcttcccggccaattcctcaagtttcttcgtttcatccttcgttaataaatgagcattgtcataaacatattgcttctgttccgcggcagacgccgatgtatgtaaagaaaaagacagcatcagaaaaaggacgaagcagaagagacacgctttttttatcgatactttcatcaaaaaccgcctcctatcataagtgagacgagtcttaatgctaaaaacgcaccggcggttatgccgccgaaccacgcggccacttttccggcactgatcggcggtttgccgacaaccttgcccgtctgcccgttcatcgcaaaaatgtgctcagcccgctcatagtcgtagctgaccatccagaccggaagcagtacgtaaaagctgctgattttatcggtctgaatctgctcatccgtaatgtcagccgtcgtatacccggagaaggtggatctgatataagaatcaatataatggctgattttatccttcgcccgcggaaagagatcgtcatcggtataattgtacttttccgctatatatcccgctaaataggccgtattaaactccttcagctcactgtatgagtaaggctccaatttgtccattaattcatcattcattttttctgaagcgtcgaccggaattttgagataatcaagattgatatcgcggtacgcgttgtaatactcggtctccgtcacccggtattctccatcttcatagtgatgcactctcgtacaaacggcattgacctgaaccttgctgtttaagtcaaacatccaaaacggcacgtacatgccggttatgctcttcacccgatcggcagtcataaatcctttcggtgtcagacggccgtttcggcaccactttttaaaagcgctcatggcttcttctttactgatcgtaaaaggaatcaccatcgaaggcgcgagatttcccgataatcggtcggcgagaacggcggctcctccgcaaaacccgcacgtcgtggccgtcgtttccgcctcagtcattaataccgcgccgcagttctcacagcggtactcgttcgcctcattttcggaaaatctcgttgttatatactcttttggcaggctttcaatctgatcctgccgcccgcagctgtgacatgtcagcatgccggatgaactgtcaaagaccatatcatcgccgcagttcgggcatttataagaaatgatcattctgtttctctcactttctctttatatcggacaaagctgcagcccgctgtctattgatctttactgaaaagcattttctgcttaagcgccgccaactcatcgtcgacactgctttgattgctgtcatatttagccgtcagctcgtcaatatcgtctttcggagacgcgttgagctcagccatcgcattggcgtgatcaagcgcccggttgaccttgtcttccattctgccgaaagctgtcagcgattggcccgcatttgacacagaggaccccaatttgttcattctctcctgcgtttttgccacagaccacttcgctttgatggcatttcttcgcgactcaagctctccgatatcagcgacaagcttgtcatgcattttgcgcatttgagacgcgttggaagaagcgagctgataagccgtttgcagctcagtcagtcttgattcaacagccgttttcctttccaaaaatgtccgcgcatcggcttcattgccggcctgcaacgctttcatcgcgtaactttccatcttttcggcatcagcctggcattctgttaatgctcttttcgcccgctgttcctcagccatgacagaagccgtctccgctttcacttttcctaaatcactgttcagattccgtaaatattgatcaaccattttttcagggttttcagctttatccagcagcgcattgatattgcttgacataatgtctttaaatcttcctaaaatactcatttttcattttcctcccaaaattaaatagtaacaagttcacagttatatatactgtttttttcgaaaaaggtttcattttctcttgaatttatgtatttttatatgaaaatagtctcattcagcccatttgtgccggcggaaattcttcacgagcagatacagtgagaacaaagaataaacaaacagcccgatcatcaacccgctcactaacggataatgcttcgccgcatacacaaagaaatccagctgcgaaatctgttccggacttgtaatcgtatccgtcccattcaaaagctttgagaatttagccgtatcattccaatcaaacgagtcagaaacaagctcactcccctgataccaattgacagcggcgagacaaagaaaacaaaaaacagaaaacgcgcattgcacaataagaaaaacatgtttcataaaaaaattcctccgcggttcaatatcacaggccgtcacactgtacatgacggcagcagcagaaacttggttttactcagaactgataaaaacattattgtatgtacttcacagcggttcaatttactggatgcctttctaaagtataccgtatatcgaaaagggtttcagacctaaataaagaggatgcttcccgaagtccgatgactttcaagaaacatcctccatactttacagtgatacttcaacctcttttaagctcggcaaagcatcaatcgcaccgattttggtgcacacgagcgcccccgctttattggcaaatgagacaatatcacgcagcttcgcaaaatcttcggctgccgtctgaacctcatccgtgcgcgccagctgatacagcgccgcgccgacaaacgcatcgcccgctcccgttgagtctattgatgtcaccggaatgctcggaatgatgtcaatatccttcccatttgaaagaagggtcccgcttttccctagtgtcaccgccacaataccggccccaagctcatgaagaaccgcaacgccttctttatgatccttcgcaccgctgatgatctcaagctcttcgtcactgactttcacaaaatcacttacggcaatggctttttttgcggtgtttataaactctgaaactcttcctttccataaatcctcacggtagttaggatcgaaggaaataaactgtccattgtctttcgcaatcgacatcagccgtaaataggccgagcaaaacggatcagataacaatgccgtcgctgatccgaaatgaaggattttcgcatcgtttaccttttccagatcaatatcatcaagcgtaaacaaagcgtccgctcctctgttaaacacaaagtcgcgctccccgttttgttttaatgaaacaaacgcaagcgttgtaggcgctttctcatccatgacgagcatagacgtatcgacatgtacggcgtccaatgtctgcttcagaaagtacccgaacggatctttgcctgttttcccgctgaaagccgcgtctccgcccagcttagcaatggctgccgacacattcgccggtgcgccgccggcactttttaagaaattgcgcccttccgtcaaatcaacatccacatcggtacaaaagaaatcaattaacaattctccaatacaaataacagattgccttcccacattatcacactcatttatcaattctcgattatagtttcagtatagtgctttctgtcataaatacaaccgtttacatagaatattttaaattttacgtatacttatctggcagccctttgctccagatcagacatcatctgctgatattttttttcagttaaaggataaaaagaaataagaataatagacagcagaatgaacaatcccggaatgagcgcattcatatttttaatcgcattcaatgacgaggcggtctgatcggtattcgcggcatatccggcgattccgagataaacggccgaaaatgaccccgctaacgcaactccgagcttattgatgaaactcatgctcgaaatcaccacgccatcagcccggactccggttttccattccgcataatcgacacaatcggcaaccattccccaagcaagcgtatttaaaggcgtcgtgaaaaatcccgaaacgaaaagccaaaagaaaataaggggaatcgaggaatacgatgtaaactgaaggcccgcataagaaatcagcgataacgccgccgtgatgatcatgacctgcttccggccccgcttcttagaaaagaaaggaataaacagattgctgatcagcgctgcgccgaaaaacagcacggttcctaaaaacacaaattccttatggctgacgttatacgtaaaatagtacaccatcgtgctgagcttaatgttaaacccgatcgcaaaagctaaaaatgaagaaaccaaaatgagcaaaggcttgtttcggaacaaaacagacaacgtctttttcattccttgtttttttcttttttcaggctgaatccgttcccgcacggtaaagaagctgaacagattcaatgcgatgctcaccgccgcatagataagcgccgtcatctggaatccgaacgcctgatctttcccgccgatggcgtccgcaagcggtgtcgcacaggaaatcgataacagaattccgatataaaccaaaatcatccgggtcgtcgtcagaaccgtccgttcctccacagaattcgtcatccgacccgttaagctgttgaccggaatcgtctgcatgctgaaggacatcccaagcagaatataagtgatgtacgcataaaccatgttccctgtctcgccgaaatgaggagtcgtaaagcataagaacgtaaataacgcaaaaggaaacgccacccacaaaagatacggccttgcctttccccatcttgtattcgtcttgtctagaatcacgcccataatcgggtcaaaaatagcgtccagcacccttacgataagaaacaaagctgcgatgaccgcaggcttaatgccgccgacatctgtatagtagaataataagtatgcgtttacaaactgaaagataatattgtacgacatatcgccgaatccgtagccgatccgttccatccaggacaggccgcgatgtttcgtctttactgccgatgctttttctgtttcaatcatcatttcccaccccaagaatccgttttcatttttgataagcaagagggagaatgcaaagatcctccccgttcactcagcgatttggatacaccatcacttttaggcattcatttttgtattgaaaggcgcgttccatcgcctcttgcgtcttctccagcggatattggtccgttacaagatgcttcgtgtccactatgccggaagcgagaaattcaattcccttcggatacgtattcgcataacggaagattccgtatatatcaatctcgttatctgcaataaacggcacattgagcggaatctcgttctgagaaggcaaaccgacaatcgccagttttccgccccggcgcacggaagccagtgcggattgcaatgctgccggattccccgctgtttcccaggcagcatcaacgcctctgccattcgtgatcgttttgatttcttcaccggcatcctgttcccggacattgatgacatgcgtcgcgcccatttttttcgcggcatctaaccgcagcggctccaagtcggtcacaatgattgtgcctgccccgtatgctttcgctgccgcaacggccatcagccccacaggacccatgcccatgatcgcaaccgtggaaccgggctgaagcttcgttctcgcggccgcatgaatgccgacagaaaacggttcgatcaaagccgcatcttcataggaaagtgaatccggaatcgaaaaaacaaagtcctggcgcattttgatatattggacaaacgcgccgtcaaccggcggtgtcgccaaaaactgtacatccgggcaaagattataacgcccttctttgcacgcttcacagcgcccgcatgtgacaccgggttcgacggcgacccggtctcctattttaaattgatcgacagacgatccgacggcggcaatttctcccgcgcattcatgaccgaggataaatggtttttccactacataattgccgattctgccatttgtatagtaatgcagatcagatccgcaaattccgacagccatcaccttaatcaacacttcatcatgattgatgtcaggcacgggcaatgtttcgattttgatttctctcgtgctgtgcataaccgccgctttcatgttttgaggcactgtgtgagtcatttggcaaaatcctttctctgctttgaaatgtaagtgcatacatttttgttttctctgttactgcccctattttatctgcttttccatacgttcaacagcctttcctgctgtataaaaggacagccgcactgtactttttattttttcatatacaaaaaacactgaattgataaaatagtactaataggaggtgcaggctaatggctgaactagaaaaccggacacaatttgcagaactgctggcacctgccgtcaaatcgctgaaacttcatcctgattataaagtcagaaggaaaaagaacgaaaaaacaggacagtcttatatcgatcaaatcgcactccgattaggcgtttcctctaacacgatcaaaagctggatcggacagatgggcgcaaactacattcccggacgaattgacgacggaaagctgttcggcatgatctggatcattatcgaaaagactgacatggatactgaatggctgaccggccttctggaaaccaccaccattcccgtcatcaaacccgcattgcccgtttggacggcgtcttgtctaaaaaaagcaaaaatacaccggaaagacggatcattcggagcgccgagtgatgaagatgttgaaaaagcagtaaagcggctgtttcatgacagacccggccatgaaacgaatgcgcttacagaacagcccgtcacgcataacttaccgtcacgccggaccgggaactttatcggacgcggctttgatatagaggcgatccggcaatggatgctgtctccgtcaccggtctgtttaatcacaggctgggccggcatgggaaaaaccacaatcgctcttgaagcagcctacctttgtgccggcggttcaccagattggcctgcattcaacagcatcatttggatcagcgctgactggaaaggattgagcttcagcgattttttaaacacgatcgcctatcagctcggacgcgcagaacaaatagacaaatccatcaacgaaaaacggttcgtcgtccgtaatgcattagccgctcattcaaacgaaaaacccgtgctgctgatcgttgacagcatcgatacagcggaacgtgacattcacgaatttatcatcggtcttccggaaggcgtaaaagttctccttacggcacgggaaaacgtaaaacagacataccgggacggcctcggggaactggcggccatccagctgagcggccttgaacaaacggatgcccttgaatttttccatcaagaagtgcaccgctgtctgcaaacatgcaacctcccgcaaaaacgggaaaagctggagcagctgcggcggctatcgcctgaccttaagaatgaattcgtctcggcagccgccggcaacccgaaggccatggcactgagcattgcatacatgtcagacgacgacatccccgctccccagctcattcaagaacttaaacaagcgggctactcattattggaattgtttgaggttctctttggccgcacatgggacagatgtcatgaagacacacggaaactatggcagacgctttgctttttcgctaagccccctgatgaaaaaagcttggctcaagcggccggattagacgtccggcggtttcattacgcgattgagcaaatgcggtcatatgctttaatacagccggaacgaagcgaaggaagaattcaatacgcagcccatcaaaccgttgtcgcttacggagaacagcacttatccgaaaatcacgaatttgaaaaaggagcccgcagccgctgggcgcattattatatcgattatgcggaaacccatataaagcgggaacagcccaattctgtctattggagctatctgctgggacggaatttagagcaaatgaaaaaggaatggccgaacatcctaaaggtcatcgaatggtcgagtgaaaccggacaacatgacatcctgatcaaactcatcatccgcatcagccattttctaagcagaatcaacctgcccctgcgaatcgaatacggattaaaagccgccgatgccgcccgtcaatcaggcgaacacacgcgggaagcctacttcaggatcgacacggcaggctgggcgctgatggaagttaatgatgcggacgaagccctcaggcaaatagaagccggcctgaagatactcgaacaatcaggcgcgccggatcacgacgacttgaaagtatggggaatcgccctgcaatcgaggctgctgttaaaaaccggagaaccggacaaagcggcagcaatgctggacggcatcaaagatcagcccgtctcccccattatccggcacagggttcttctggtccgcggcgacctgagtttcgcccgctctcactacgaagaagccatcacattatacgaagcggcaaacacaaccagcgccgcatacggcggcgaaaaaacgatagaagcctatttcaacctgggcatggcttacgtcaagtgtgatcaactcgaaaaagcggaaaaagcctttgaacaaatgctctatgacaaacacaacgccaatcaagttgagttgatctattactattacggaatggcacagctgttgtatcgtaaaggagaaaatacgaaagcgatggaatcgaatcagaaggccattcgtctgattgattcgtgggagcctgggattgggattcggggtgaggtggagcagctgagaatggtgcttgaaggaaatgaggaaatcacattgtagttaggaaagtgtgaggtcaatcttagacaaacgatctcataccttctcttttttataaacaaaaaaggtcttatctagttgagtaactgataagacctttctgatagaacgctatgagcatttcaagtgaactcaacagtcaatcccttggtatacccaagggagattacatcatgccgcccataattaccacggttttcgctcgctttcgcaccctttcaatcggtgttatttttttagtgtgatcatgaatggaaaagaaacaaaaaccgcattgtttcagaccctgacgcaactttcgttatttttgtgttattttttaaaaaataacaggtttgtttgcatcgcgaacacacgttctttataatcgtctccaaggagatgaaacacaatgaccgattttgagcgtaaagtgtatcggattatttttaatatgacccgcttcgggaaaaatccctccatggaacaattgaaaaggaaaaccgggaaagatgagcagacgatccgtgctgctgtgaagaatttgatgaggcagcgcattttgaagtgggataagcataaaaacaggtggaattttaaataaaaaagaaagcagggtatctccctgctttctttagcgaatatgtagcgaatagtaataatagcgtatgtgttttctaatgtgtattcataatacatccaatatatatttcctgtcaagcaaaaaagcaattattttacaacttgtgcttgatcttctgattcagttattttagctaaccctaattcagaacataagatttgatttttggaactgccctttaatttacctttgcttaacacttttgtctcttcaacaataaagctcttttgtttaagttcctctaaaatctcactaataatctctgctggggtcgataatgtatttattagatatcttttgaaccaactcaagcctaagaacagatctccttgtgtaccaaagctatcgtgccatttctttatctcaacaagaatttgattcataagtttatctcggtcatactgcttttcttcaataccaagtaaactcgccaaatcttcagcatgatgagcataattcttaaattcaatatgtttaggagcgtttttagctgaataataaagctcaactctttttcccttgtacattaatctactcataataggaatcatgtcactatcagctgttacaaaaacataacaactaatcgaaggatccttgtatgtattttcaatagcatcaatacaaagttcaatatctgatgcatttttacgatgatccccatcttttccatttgaataaacatgccttatttgaacacgctttttttgaagacttgtcatattacttcttaatttgttaaaatccgcatacactctaaatgaacgtacattgtcttgaccgtatcgttcccataaccttgaaaataaatttttatcttcagattgataatctggatcatggctataattattcattagagaccagtaaacgttatcataatcaacaaaaatagctacattatcaagttttctttcagaattaaacgttcgattcgaatcgttcaccacagatgtcatgatttggaatgctgatttaagctgttcgtcaactgctggttgtggtaatggctgggcaaccgtccctgttcttttttcttttaattcgtccaattaaattccctcatttcattagaaataacacacataaaagaatttaccatatattcaccaataaaagtatattttttgacttcatactagcttaaaagttatgtatttctcccatttacaacaaaaaaagcctcgtccattggacgaggctatatcacttcaataatttttcaagtttcgcttttgttttcggcccataaatgccatcagcaggcagcccgtacatagactggaaccgtttgactgcatttgctgttttcgcgccatatgagccgtcaattccgaagttctttgcgctcttatcggggtaataatgaagagccgccagcgcggtttgaatctgttttacggcctccctcgggtcaatgggcttgtcactttaaaaacacccgcaggcagactgaattttgatttttgagtggttttaggctttgaggcttttaccttcttttggccgccgcttttcagctcgttatcgcttttgatatatgagacattcacatatccgtggaatgtctggcctttagaattggtgtattcaacatatccccatccgttgacagttgatccaagctgatattttacaaccgtgccattcggcaggttaagcaccatggaagaagaggcgctccgttgtgtacgtaaaacaaggccatcgcttgaaaccaccgtgtttttgatgaatcttcctgtgtctgtatgggtaacatccggatttgatacaggcgccgttacaaccacaccatccattcgcttttcaacacggctcttaaaatcggcaaacccttgagagttgcttacccacggcgccgggcaaattttatgtgtaatgtcataatgtcgaacaatatcattggttggatcaagtttgtacattttgcacagctcggcacaaacttgtcctgcacgggcaatcgtatccggatggaaagtgccgttcttttcaatgcaaagctccacgccgatagataagaaatttgcattcggtttcagcgccgcgacaccccggtaaggctgcccgttgacgaattgctgaatgtcattcgcatgataggcaacctcattcaacggaatgatacaaatagcctctgtacgatcgacaaagatatgtgcagatgcaaacgtctgttttttctcagatagatttctgttctgtgcggggagcgtttggccaaaatatctataatgattggcagcaggcgcgccggggttggccgtgtaatgcaccacaagtttcttcacgccgttgtttttgattcccggccgcgtccatttattaatatcaatatattggtttctgtatgctgacataaaatctctcctattctgtttttggattcaaaaaagcagccggattaaccagccgcctgatcatctttttcttttgtctgatcgttgtcgctttcaattacgtgaagccggtcagtgatgacggccggaattttaacgccgatctgcgccaaattctccgtgatggacaggccctcatttgcgatataaaaaagaacggttccaaaggtcaggacgccgttcaaatttgttatcgtatcaataatgttggcgacgatgaccaccataaaactgagcatcttccgcacatacccaaaccacgcgctgcggctccggagctgcttcattttccacgctttgataatgccggtgatgacatccaagatgctgaggattagaagcaagtcaaggtacttcacctccccgaaaagatatgttcttgcgatctgtaagctttcaaaattcatccacacatgtattccctccattttgatcacctccttcgaggcaaaataaaaacacctattcagttacaggtgctggttcactattattttctttcgccgctactgccgcatttaattgcttttcgagttcctcgcgtttattatctgtaaacgtgtatagcgctttatattcggccagctcattgttcttcagattcaattcctgctgtagggaagcagctttatatgctgctatttgtaactggtcctgaagttgctcttttgtcatttcttgcatgcctttcactccttactcttgatcgggatacgcattaccgcgttcgctttctgtaatttcatcatattccgcttgtgtgatgcggcctttctcaacggcttttctcatttcaacggtcaaaacagttccgtttttccagcaatcctcaaaaaacccgaaaagagcacttcggttctccaatgggctccccccgtttccttttattgattcattaagagattgcaaacccgctgaaggtcaagaacttgttcctgcaacttttcctctgtagtcttttccttctctctatcttttgcttcaatatttaataccacgggctcaagcttcatctttgccatcctccttattttgaacatagattgttataagcccttctcggttgccttgtggatcaacgacaatttgaactggaatcataataagctttttgctcccactgtacccttgataataaccgtcaggctctacataagtttttgtgagcaaataacttatttcatcagcctttatatcatgaaggacatataattgatacgctacttttgttgtatcgtccggctgcagatcgaacgaaacagcctccatgggatatgtcttgtctcctttttttatagagccggcagttatttcaattcccgcgccggtttcttctatttcgatgccgtccgcataataaagactcatgttaaaatcccttttttcaaccataaaaattactcccttattgtgattcgtaaaaaataacaatttgaacctttattgtttttcccgcaactccggcagtagtcccggtccctctcactccaatatcaacagaactggcgcttatattttctaatcctaccgtaaccgcattagaatatgcgccaatcgctgtacctaccgccgcaaaaacgttctcaggcgcataatcaaaactatcaacaaaaggaatgcgattgtagcgcgcgtacgcagttgcccctccgtcaggcggcagtttaatgtcccaagtaaagcagtaaaccatcaaaccgtattgtaggcctccatgctcgtcttctaattctgtagaaacattgccacccatcaatttgaattcgcaattttttgcattccctgctacaactttggttcccaatggcagcgttaaatctgatgcatcaacaatcgttttttggcctgatttcagtcgaatgaccccggggacatcaatatctaaattattcggtttaaagcgataaatagtagctgatccttcaaaaagggcctgataacggttatatgtgaacggctctcctatatttttaggattggtagtagcagtaagaagaaaagcgtcttcttcaacagctgcctgtctttccattttcatattaaaatggcttataacttgtccaacatctcctatttctgaatacattgaaatagttggaaccgtttcatatgcggtttgcttgcctgcgccacggagctctattttgccatcaccaattgaaactgttctgtagatttcattataggaatcaccaggatcaaaaaactttccttgttcctgcgttattttcccagaactaacaatcaatttgttgtaaacataatgagagtctctggtgtactggtaaatcttatcgccttcgatatagtattcggcatcttctgattgtgtcagcgcctcgaaacgggccccttttatggtcaccccctcaatcgtgataccttttaacgtcccgacatttattttgtccgctgaaaggtctttgatcttggcgtttgttattgaaccgtcaatgatgtgtaccgaatcaattattgcttcttttagatgcgcctttgcgatagccgcattttgaatagccgctgtcccgatagccgcttcagctactttcgcacttgttatggctgcattttttatatgagctgtttctattaccgccttttggaggtggtcgccatcaataacaccatcaaccagctgagtatcaaacgggctataaccataatcagaaatgacatcgcctttgcgcacctgtaccttacgaataacaaagctacagggctcagtgtttccgtttcgattatatccgccgattccaattgtgtaatcagagccggtttccggagcagtaaatttgatattaacccttataaattggtcagacggaaaagcagaaatatctttctgttcatcgctgctaatctgtatgaaagtgctgccttttttcaaatgaatataacttatgtcggtggtattattccgttttatttcaaatgacagtgtatattgttgatctttgatcaatgccattctttgaatattaacaggcgatgacctgttcccgcatattccgaaagctattctagttgttccattgatgatctgagaaacagtcatttcattaaattctttttcctcaacactgtggctggtgtccgtataatcatagaaccatttagattttaaaagagagccaggtaagatattagcatcatcaaagtttcttgaaagtttatcagcatcaacggccagctgggccagtttttcctttgtgatcgctccgaaaacaatgtcatcagtcaaaatgcgctgagtggtcgcggaaaactgatccgtgaattcgctcgctgtgcctcgtgtgttgattgagcgcaagcgataataccaaacttcatttactcccgtaaaatgctcatatccgcctgttttgcctctgaaaatacgattctcttttaatggagtgaatccatttacttgtgaagcatatacctcataggctgcaatataactggacggatcataatcccatgtcagggccacattctgaaacattgccttgatcactacattcgacggaactggcggggctttgtcagggaaacttccatccgtaacctccccggcatccggtttgctttcccaagtaccgcggtttttttctatcacgctttcaatttgatcaatccggccgtctttttgtaatgctgataaaaattggccgatctcaacaacgcaagtattttcagggtcggtaatatcgtattccattgaaataatgcgctgcgatgtctcgattgggatagcgaagtttcgatcaattgcgatcgttgtatctcccaattccacatgttcgtgttcgtgtcccggcacgctctcaagcagctgcacagacaactcataattgatttctgtcttacatgcagtcgttatcaaatgattatatgtggcctttaaaagctcttccggctccgttatgtcttcatcattgtattggccttccctatggatcaactttccatctttaaggcgccccaatcgttctaataaatccggatcgccaacccattcctggcctaaaggcttatcgaccgggtcgccttttgattttttccattctacttcagagaaatcaataaaacgagaatagccgcccgtttcctctccttcctcatccgtagatgctatggatgccccgtaaccccaaagggctgtcaccgggtaactgataacagtccgccggatattcgttgtatccttatcactctcaaagcgcttcccgctgtctttaccgcgacggggaagtatttttatgattcgtttgacgaccttatttccatcaaattctatagtgtcctgaagctctccgccccatatattgatcacgtcagcaatacaatccaacgctgtttttttatagaaggtagtcgaattcactccaagctccgccgttacttccgccacccatcttgaccgagaaaggacgttgtccagtacaaactgagcagttttgttagttgggcggaaatcttttacaaatgtttcggcaagctccatcatggcagcctcacaggtaacctgggtgttaacctctccttcttcgtctgcatcatccagttccttgatgacaaacagacgcattacaccgtccttatccttgaataccacttgattctcttcgaataggaagcgcgcatcagggtgggaggcatcggctacaaaagaaaaagaagagcccttgttgagctcttctttgtatttcgcatcccagaacgtacaggtttctcgtccgtggctggacagcactgtcaataatttatcatctggtgaaagtatataaatgtcagccatgaccggacctccttacaaatatgcctcattaaatttgatgctgctcttatgactgaacttgattttaactggcgtcctaggcggcagcagaaaccaatctgattgaatttgaagtgctgtcatgattaaattaccgctgcaagtgacttttctttttgcagaatcaattacaagtgtgtcaccagcgatgaaatcgtacagcagcttgatcgttttcgatacagacccatcaccattaagaagagccacttcatatgaagtggctttctcttcaaagacgcattcgattgtcgggtctacggccgcatagcccggattagtgatagtctgaatacctgaattaaattcaaaatccttcgccgggccgtatttttttggatcaggacagataaaagtcaatgttgcagtctgaaagcctccctgttcttcgccttctgaaatgctttcaaagacagcattatagactctgtcaggctcatcgtgaaaaattaacggtttaggttcttcggtgtgcagaataaaagtcagttcctcctgctttttcttcagctcttcttcactgctgaaagcaaaaagaacctcaacggttatgactcttacaggaattcttgtgttccgcaggaaaccgccggggcgattcccgatagtggctgtattcacttctcttccggtcactccccggccgcccgtggacttcacataaaagaagggtgatatatcaatgccgtcaaacgtgattttccattgattaggcagcagttcctgataattgatcaattaaatctcgtcctccttgcgttcgaccttttctgagcgtctgtgaccggtttttctacgccttgaccgaccttcttgctgtccatctcaacaacaatcatcctgtcaggcaattcaaggttccggatgtccgcgctcaattcttttctaaccgtgccgagttcgctgctggaaatggatgtgtcatatgcaaaattcagatcctcctgctgaatagtcatggcatcactgacgacgcccatagctttctgaacagtgccgataccattctgaatccccacagcgataccggcaggaaccatgaccccgacctgatcccgcatcaatctggatggggaatggattttcaatttcttcttaatcgttttttcaattgtcgaggcgatggaatttgcttctttcgccagctcgcccttcatattcttcattccagaaataatgccggccattgtatttgaaccgatggcttttccgcttttcttgagagaaccaagctgttttacatccactgtaagctccccaattttgcggagatagtcatttttcaaaagtgccagttctttatttgcggcagaccgtaattcatttattttcttggtcgtcgcgttcttcaacccggttaattcttgagcagcctggtcactggccagcttgtgcttttctttccacagactgacatactcatttagctctgaatctgtcatgcgggctattgcattaatctgatcagctgacccgacacccatttctttcaattcgtctgtgaatgcctttggtgcccggcttgctatttttgtaatgtcagtgttgaacgttttgatcttgtccagctgctttttaagatttgaagtcagcttggagccgttcacattttgacttgagacatcgtcaaatagaccgatggcgttataaatcgcgtcagttcggtcttgcagctcctttttataggcatcgttggccgccttaatatcggcagtcagtttatcattcacttttttgaattttgagagataagtattgtttgcagaaagaatgcccttgttaagtttgtcagccgctttcttttcggcttccttctgctttctggccttatcagtcatagctttttgagtctgatagatttcccgttgaacctttatttgctggtcagaattcagcttgttcttcttcttgattttctcaagcgttttgatataggtattcccgctgatttttcctgtatcgtattttgcctcagctttcttaatctgatctgatactttcttggtatacgccagtttcgccttcgcttccttgcgctgctgctctttcagtagcttcttctgtttatcagaggcgcttttggatgcctgatatatctcgcgctggatttttcggttttgctcactggtcagcttgttttgcttctgaatcttctgcaatgttttgatatacgtatcggcgcccattttcttggtgtcatacttcacttcagcgttcttaattttgttggatacctttacctcagccgccttctgagccgctttcgctgcttttgccgcagccgcttttacttttccctgtgatttatcaatacctgccgccataccggtgccgacgtgataaccgacctggtcacgcattacccttgacggtgaatggattcccagaagctttttcatgccgttaggaattgcgtttgccattgatttaactttgctcgctaatgcacccgccatgccgctgataccatttattaagccttgtatgatgttgcggccaatggacttgaggttgatgcctctaaaaaatttcatgacactattccaaatgctgacgatacgttcttttgttgcttggatacggtttacgatttgcgctttcatgtaactaaatgctgtagaagccgcgcctttaatgccgttccaaatggacatcactttgcttttcactgtattccagaggcttattactctgtctctcgtcgctacaattctattgacgatttgcgcccgcatgtagttgaaggctgttacagctgcactttttaaagcattccagacagatgtcactttgctttttatcgcgttccacaaactgaccattttgtctctggttgcaataatccgattcacaatttgtgcgcgcatataggtgaaagcagtcactgcagcacttttcagagcattccatatggacgagactttactcttaattgcattccagatgctgatcattttatctctcgtcgcaatgatcctgttaacgatctgggcccgcatatacgtaaaggctgtgacagccgccgatttgagacctgaccaaattgatgtaacggtgttcttaatgccgttccatattgaagtcgcagtctttttaatcccattccagacagaagaggcaaacgattttatagcattccaaactgttgtgaaaatggttttgtacagattgaattcccacttaaaaaaagcagatagcccgttccaaatggttttagcagccgaaacaattccattccaaacagtggagaagaacgacgttattgcgttccatgttgatgttgccgctgttttaatgccttcccatacagattggagccactgagatatgacaccccaaacttgaagggtgtactgcttgaccttatcccaattggcaataatgagaacaactaaggctataaccgccgccgtaatccacccgataggccccattgcgatgacccatgatgctgccatgcgcgccgcatttgccgctgcttgagccgccagaatgaccaagcgtttaccaaataagatcatttgcttaattcctgccgccaacattgacacaaatgaactgatttttgccgcagtccacgccgctgccatacgtgttgcttgggctgctgattttgctgctaaaacagttattctggcaatgaaaagtcccatctgcttaatgccgtttttcagcattgttataaaagaaccgattttcatcgcagtccatgatgctgccattttcacagcattagctgttgcttttgctgccataacggtatatctcgcaatgaattgccctatagtaactatcgctgattttaattgggtgatcaatccggccattctaattccggatgcggcagaactgaaactccgaatatatcgagcagcagtcataaagtctttaagcccatttgttacagcactgactgctactatcgccggaacaatagctcttaaagcaccgattaatgaaatacccgccgcaatgaacttcccgattgccgggtttgcttccatcgccgcattagtaaatttcaaaaacccgtttacattctccaaaatcgttttgcctagtggagccatgccaacaagcaagttgatgatagttttcgcgatctgccccaatgtgctccatactgtagggccgttggttttaatatagtcaatgaacgattgaaattcttttgttttcgtaacgctgccagcccactcattgaaccgcttggtcaggtctacgagggatgtcatcatgtcttgagacataggagcgaatccagtaaacagctttgtcaggccgcccgaaaagtttctgataatctgcaacaattttgggccgttggtttttgtatactccacgaaagcctggaatttctttgaggagcctaagttcgctgaccatttcacccatgattgcgtcattccttcgatagactttgtcatgctctttccggtcggtccgaatgctacgatgagattgaaaactgtccgcaagacattcccggcagatcggccgaatgaagcaaacgccttcggagcttctttgttcagataggaaatgaatctctgcatgtccggagccttgaaagccttgtccatgctttttgccagtcccacgccctctttcgccagcccgtcaaacattggaatcagtgagttaagcgcgagtttgaacgtattaagagacataccgaatgtttttaagatcggcttttgaaccatcgtaccgatgtcccgccagttgtctttaaagtcttcgaggttctttaatgcctctctctcttcttttccaagagatttttgcagattattgatctgtttcatgattttagcgcgctcttttgcgcttgttgcattgtccagcttctcctgtagcttggaaaggtcttcggatgctttgaatacaccgcttatcgaagtaatagcaagggcgccgaatgccgccgcgcctgttcccgctgttgcaaatgcactggttaaccccattactccgccggctgccactccgagcatagggcccaatgagccgattgctccgacaatacttgcaagggctggcgagattgcaggaagtagggacgttaatgccccggcaattgaatgaccgatgaccgttgaaactgagtttgtgatcttggcaagcctgttcattgacgtttcaaaccgatcaattcgagcttctatactaatccatactcttctcggcaaggacgccagagcagcgcgtgccgttgccacagagcgcataagcgcagccgtgtttccgtttatgaccgtggtaattctgtttggcagtgaagccaaagctgaacggacagccgaaaccccgcgcatgataggcgacgtggccgcattaaaagtggtagttacgttatgagatactgatgctatggctgaccgcgcaacagcgacagcacgccctaaaggagtgggatttccgtctatcgtcgttgtgattctgttcgccaccgccgatagccctgctttagcgcgtgccaatgcggaagataacggccgcacattccccattaattgcgtggtgacagtttggggaatctgtcttaatctttgcttcgcccaattgatggcccgagttaaagggtctgaatccgcatctaaatcaactcgcgtgcgttgatgtcgatgaacaaagttatctatttgttgcgccgcctgccgtactcttgcctgaaagctggcaatctcggcgtcaacctcgactgtgtgatgatcagccatccggcgcattatatcgttgacacgatccatactgcgattaaattttcttgtctgtgcttcaactattgctgtcagtctttcgatcattccctcaccccattccttgtccgaattttgcaaagtggttgcggattgcatcattaaaccgctgaacccctttggctcgtttgccgagctcgtttacatctgacttgcgccatttgtcgttatcgccagtgatattgcgctccaattggcgtctggccttcttcgcatcaaacattttcgtttctttggggcgcttctcattcatggcgtaacgatgaaacatggcgtttcttgccataagctccaattcatctatttctcgcaacttggctcctttgagcagaagcttgtactcgttaggagtccatgacatgattaaatccacatcataaaccccgagccaatgtgcggagttcgtaattatttggtcgtagtcgatcccgttctctctttgtatgcctctttcatcatcttcaagacttccttgccgttctcttcgtcctccaaccgtttcgcttccatttccggtgtttcgttcggagctggtttcttccctttgttcatcttctccatcatcttccaacgctgacggattacgcctttgaaaaaacccgctgaatccagtgttgtgaatgcttcattgatcatcttgtcaattgcgtcgcctgtctcgtcttcatcaatgattttcatgattgcttcttcaatagcctcagttgatggcttttctttcttcaagtaagcgagtgcacaatcccaaaaagcagaaagataggaagcctcttcgttgagcagactcatgtaaatattcattgtgccgcctttgcccttttcgtccgcagtggaatatttttcgtttgccaatctgtcaaaagcaaagtcgcagcgtgatttgtattctttatctccgatagttaagtaagccatttataaaacctccgattatttttgtatgttaaaaaagagcccgggaagcccggaccctatgattccttttctgttcgtatcgtaaaattggccgatcgttccgattccccagccgagttcactgccgacacattaaaaatgtaggcagtgtccggcttcaggttaggattcgacgtgtacgaattctttgagacagtcgctatttttgcataaaacctgtaaatattgtaagatgtcgcccctttcaccgcatcccatgaaaaactcacctgatttgaagtggcgcttttcgcagttatattgcggggaacgttagggcgtaaccgcttgtgtttgcgtaacaatctcagtcattgaggactcacccgcatcgttcacagcagagacgttgaccgtgagtttcgtatcggccgcaattcctgtcaaggtgtgggatgtgccagtgacagttgcgtccagctgcttgctcgctcccctgtataccttatatgaagttgccccatctaccgcatcccatttcacggtcacgctgtcagctgtagccgtgaacgatagattttggggcgcattagggcgtagttgtttttttggcattctcgccaaactgcatgaactctttggcaccggcagaagatctgatctcgtcaattaattcttgaggcagaggatcaagttcacctttacgggtcttaccgagaacaggcaatgttgttgaaacctcaataaacccatcttgcggtgcacttttttctaagttctcgatgattgcatgtccatattcagaatcatgcttatcgtttttgtttttattcaggtttactttccatacctgaactgtctcttcgttgtcataagcatcttcaatcgccgtttgacccggatcagagacagcagcatagtatgtcagttcgatgctctcagatttagggccgtacccaacaattcggccagactttgttgattcatcttttgtatcttgttctttcgtatgactgccttctgtttggaatgcgataaacagaccttcagttgaagtagcattcatcggttgaacaaagtaaacctcatcaataccattcaataaatctgccattttgttcatcctctcaattgtttattgtgaagcgcattctgagaatgccgtgacgcgtgtacccgtcaatatcggtgatcacctgcatgctgcgcaactcagaacggcataaagaaaagccctctattgttaggggcctgcttgttaacgcttgaagcatgaggctcaaaatctccatcgcttctttttttccgttgtaacctgaccagcagtgtaaaaccacattgatttcttcaccgctggatgtcttggttttaaatggggatacatcatcatcgcccattgtcacataaggcttttgctgatctttcgggactgcatcaaagacgcccgtgacgcgcccgttcagctcttcgtctgttgataacctcttaaataaagcagcctgcaacggccacagggcagatcgcatgatgacagctcctttctatcacatttgactggcaaaataccgcatgccttcgtccaccgctggattccagaacggctgtgcccgcattccccgcgtgaccacccatctattaagcttggtgtcataataaacccacggcgtttgccggccgccgccttcctctgcgtaaatccctgttccgtattccacatatacggcataatcggcaccaacagaaataacggcccgtaagccgccctcttggtagtcgatttcaattgaatttttcaagttcccccgtctattgcggcggtcggagcattcagaacagcgtggctgtaaatcagctcggccgtgtctgtgaccagttgcttaatatcatctatgacccggcttctgaactcgcttgtggctctttgcatctgcctgacccatctaccactgacctcagccattgcccttcagcacccccgtaacctgacatttcaaattcataatctcatgcatgccgccctggtcgatcggatctgatttgagagtcagcaccttgttctcgtagatgatccgcattgtcttctcaatatcattgcgatacgggaaatacacattgaaatcaaccgggttctgaagctgctgagcctgataatattcccgggacgtaatcccgccgacaaaggcctctattgtgagataatcagtgaatttttcaacatagcccccgccgccgtccggcacctcttcccaacgctgaaatgtaacgatatgcgggaattcttcatagatcatatgactctcagctttctgtatggagcaagaagcttcgtaatgctgcttggcagctctgtttcataagaatatgagacatctcccatacttcggcctgaaaggttggaaggagtcatgttatgctcgatcgctttcgcgacatacagctttacccctgctggtaatttttcatctccattgaccatgaatgagttgttgcaccagtctttcgcttgatctatgaacagaggtaggacctcggccagataggtatcgtggctgtctgtttttatgccaagcatattttttacggtttgaacatccatagaatcacctacacttcaccgagaacaattttgatcagttcctctttaggcgctttgggatcaaattcatattcgttctccttaagaaaggcaacgatttcatccttattcacctttttcaattgctcttcagtcatatcaagaaggtttgtacccggccgttcattcagctctttagattgtttggcctcatccactctcttaaaaccaatgtgagaataaaccacctcaaaagccttttcagtgcattcaatagttttggaaccgttagatgctttcatatcacgcgccgcctccttccagtgcttttatccgattctctaaatcagatagtttggctttcacatcgtcaccgagtttagctaaagtaactgccttggcaccgatgttggcattttgtacactaccagtgccgatgttacgattttggacagaacagtcaccgatattgatgtttttcacttctccgtcgccgatcatttccgaagtgatagttttaggagcaggcgcagaacccgataacccagtcaccttcgcaccctcttttatttcgagctcgccgccgatcaccaatttgtcgccgttattagtgctatagtttttagatgtgtaccccataagcttacgcctccgttgctggtgtaatagcagcaaaagcatcatcggtcagtgtcatgaatccgacttgctgagttacacggagagcaaccatatctctctcatacaagttgatcgggtttccgtctgcatcgacaatcgttgtcaatgttgcatcctctgagattttgtattccatgccttgagggattccgtaacgtgtgtaattccagtcagccgcaagtaatgccgctttttcgtaatcccatgacttagaatccacatatccgatcggaaggccaagggcttgttgtgtggcgccgcctgtcgcatcgttgaagatcggaaggccgttaccgtccttagtgccgcggagcttttgacggaatcggcgtgttgttgtaaagccgtttacatctttgtcagcgtcttcaacaagagccatgaccccgtttaactcatcatatagattgccaagtgagtttaacgcaattgtgttaccagattccttgattttttcaaatacagatacgccttttccaaacggtgaatctacaccgaataacgcagcctgatcaaatttgatcgcaaaggcttcagcgatagcagggcgcatttgtgtgaagaaatctgttacagagtagcgcaagaattctttagaaacagggatgatgacacccaatttctttgaaatcatttttgctgttaaccattgagccttagaagtttggattctctcgccttctccaacccagtaagctcccggtccagaagccaagtacgtgaattccttctccggcttactcatttcttcatattttgctagttttgtgacagcagattgggtcataaactcttttaaaaccagcgttccttgttcggttggaaccttcccatttactgagtcttgcattaatgcattgtttggattaaatgttggcattaaaaatagccctccttattttctaatacttgcttcagctgcaagcgagctgatgtctaaatcttgatttgtcggttcattgctaccggactggacatcacggccattctcttgaaacttggattcaatagccttttgaagtgcagcattgtacttctcttcgaatgctccgaggttcttcatcgttgattcttcatcctcaccgataaagaattccactacatctgccggcagttgcttttcagaagcataagaaacagctttgtttaaaagcttttcacgttgtgccgctgtcttttgatcttccagctccttttcgagcttcctgatccgcttctgctcttctgtttcttctggataaagctcttttacctttgcatcaatcagagcatcgaggttgttcgccttccacgtatcaagaccttttgtaaaatgagaatccaaccgaggctgaatgagacgttttccttcttctgtatctaaaaacccattcaccttgtcagcagacacggcagaaagttcattcagatacgcctttacatcttcgttttctttattttcttcgagaaattttttcacatcttctaaagttggcattacgcttcttcctccttcgccctctacagtgcgcgcctgttatgagtgcatgaaaaataagccttttaacgtcatgctcaggacaaaataaaaagccgctgtttaacgtcttcccttttcctcaatggatttgtaccactcttcataggtttggtatggaattgtttggcctgccccactgccgccttccctcgcccttctcgtatccggcagcacaccgtttactttaaaagcaatcgtacaacggcaatttatgtcatctttcgcattattcatgtgccccggagccggcccgactccgccgtaaattgatttgaacagcccattgcgttctattgtcttcccgtccagtttcctgtgcccggctcgtgttttaagatcaagagtagcattccacatctttttaaggttgctccgttttgaggccttctcagcgctttccatcctcgccgagacttgtaccctatgagcttctgttctcgccacgtcacgggctttcctgcgggcaaattcggtcgctctttcaatgcggcgggcgatcttggaataatcctcccccgcttgtaggccctgtgcgacggaaatttgaatctgccggacataatcgtctcgatgccgcctgtaaatagctgacaaagtcaattcagctatagggtttagaatggcctgccgaatgacttcggctgtcgggatgctaaaacccaagttaaccacggattccatttcaaatagataagcagaacgcatataattctctaaaaactgcttggctgctaatgcctcaacaatagtcagaatggttttgaaagccttgtgagattcctcggccatcctctccatttccttgttcagacgattgtatttgttggcatcggctaaagtaagctggccgtccttgctgtacttcgcatacagccgggcaatttgtgcgttgatctcctttaagcgagacgcaaaaacgacatcaatcttctgagcatcctcagtgatcatgtcgtccaggtacttatcaatatcattctggttcatcttcatcaccgcccgcgtctgtttccacatccgttaacggcggcatgttgagcctgtattcctcttcttcctcttccatcttcttcagctcatactggacatcatcaacaaacgacagcagagataggcgagtttcttcgcttaccattcctttaagttgccctgtcgtttgtgcttcttccagtacatttgccggaaggtttcgcttaaatccgaaccaaacttttttataatcttccgctgccgctttccttttagtgccccatgcggaaaagatcagtttgtattgataacgcagagcagcagtcattttccgctccatcgtgatgcatttgttttcaagcgacatcaatttatatttcatcgcaacccctgaaacattcccaccaaaagattcatcggagaaattgaccgattttgcaaagcgaaggatattctcttccaacctatcaagatggttttctatgatggcatcgtttatatcctttgtcagatagcttacgtcatctttttcgtcaagcaattcaaggactccggtctttttgagctggtcaagcgtctcttcatcagcgcccaacccttttaaaatcaggtatgccagccgatattgctcaatctcattcgatgcatcggacaacgtgcggtcatacgcatcaattaacgaaagaaccttttcagcatctccctttagttccttgttattcgctaaaccgaataaggggcagccatcaaaaagatgcaatgtttttttatcaaaagtgaaggctgagctgtctttcgtactgaaataatagacatatttctgatcatagaattctgctttgatctttccgccgtacaccgtgtaatatcgcaaagcataagcaggttcatggatacttccatcagtaataaaggcgcattcccatggatcaatattttttatacgctcgtttccagaacgatcaacgtaagcgaggcgggcgccgtaaccgcaaatagaggccattttcccccactcgctgtcttcatcagcaatgttattttccatattaaaattttcgatcaactgttttacaggtattgcagtgcttgtcgtatcgctctcatcaaactcatatgcaatagggtggccgaacaaatagcccacctttgtatcaatgatttcagagtcaaacgagttgttaagcctattgtttactttgtgatcaatacgttttaattttcctgtttcaaaatcttcgtattcaatggcttctctggataagatcggaacgccttgaacctcagcctcgtaccgttcataaagctttttcattctgtcatgatccggcttatgttcctgaatgatcttgtcaatcaattcaggcgttatgccggactgttcaatcatgtctataaaatgattcatcagctcacccctctccgtcttttcggtttattatgcgaatacagagcgtaccggagtgagtccagcacgtcgtcccattccttaaccggttcgcctgtcttctgattccagacgtacataaagatttcttttttgaaccggtcaactttgtcttcaacaacaaaaagctgttcttgtttgaacagccgcgctacttcttctataccggatacgacagctttatcagcgttaatagcccgaagtttttcacgccggaaacgaacaacgtgttctggtcgtgccgtatcacaatagaaattaatgtttccgtaccgctcttttacgcctttcgctaccttcacccagtaatgaatttcctcatgttgcttggcatattcttcgagcaaataaaaacacccctggtcatcttgtccgattacaacaatagaacccgggtgctcatatccccagtcaacgcccgcaaaatacttcttgaaattgacgcgcctgttttccaattcctcagagctgatatagtggatgtccttattgaaatccttgtatatgactccttctggcgccacccaataaccgtgtatatcccgatctgtaaacatgccgctcggcgttgatgccacgatgctctccacatattccggatcgagaaaattgttgtcgaacagcgagaaatgaaatgacctgatgttcagccgcccgcttttcagcatttgcccgtctttgtcgatataatccgttttgacggtgtgcatcgggttttcgggatttgtatccatcatgaccacagcgcctttatacgagcaccgggaaatgacttctttcacgaatgaatcgtgcagggcagtcgcttcgtttaggaatgcgccggctgatgtgaacccccgcgcttttttccatgaatcagcattggctccatcaaagcaatatacacggttgccgaatatttcaacggcattcgacttgtcgagcctcaattctttacccagaatcagttccatatcgttcaagacatttcgttttatggctgcctgagtagccccgccgatgatgaaggataaacccatattttgatacttactgacgtgagcaaggaacgtcaaaaggagcacgaatgtttttcctgccctctttgcgccgctacaaattagaattttgggttgctctttaataaagctgtcccaaacttccttttgctttttattcagttccatcggcattcaccatttttctcaacattgcagcaatatcattttcttgggtgtttccatcgccgccattaacggtcttcttcgttttctcgatattcaagcgcatctgttccaatttaagacgccgctcatcttgctcatgcgccagctggtcaaattgcttgatcaagctccggagctcccccattgcccgagattgagcgtttaagagagtcgcatgacgatcccaagcgaactgtatttcaagttcttcttctacaatgtttttttcatatgttagattgccatcttcgtcctcatcttgatgataagcgtattttgcctttttaagctcttttgccgtatcatctttattctgcacaaacataatgcgctgcgcccgaataatagccgcatattgtatctgaatctgatcccatatcatatcagcaggggaacgctcctgaatctcttccatgatttcaagcgtttcttccggcagatactttgagaagaacccatgtgatacagcattttgatttcttgccggagccgccccgccgctatttcctaatgcgtttttgttgccgggttgcccgcctatttttgtgtgcacacttttttcggtgggtgcaccctttttcctttcccaaccatgccgctgcttccacgatttgatggtgttcactgacaccccgtatttttcggcaaggtccttgtatttcacgcctttgacgtaatccttatacgcctgaatgtgcttttcaaccatctacattcaccgccgcccccttctgattcgtgtttgttttggaaaatatattccctctaaaccgacgccgcactcagaccgttaaccacctatagttttcctgagacttaccggaaccggtttacaaggaacaaaaaaagcacccttaaaggtgcaggtgctggctttcatttgattctatttctttcataagcgaaaatataatatcagccttaattatataattcattggatacttaataactggttgctcctctttctcacaatttatatagtttactatttgagctgtattaataccaaccaccttattattataaataatggggccgccgctaaaacctccataactaaacatattgcccataaaatagtttaaatggttatggaacaaagacactttgccaaatgaataaataggaagatgctgatttgttaacataggattgacgacacctaaatcagaaaagtcaggataccctatcaaacatagatcatctcctggcgttaactttttatcagaaatgtgtttaaaatccaaaggtgtataatcggatgattctaaatttctcttaaattcaattgtctcattaaaattaagtgatataatagccaagtccatctcaaagtgattattttcataaactacaggcgcctctccagactcaccagatcctaatcgatatatttgatcgacccctacagttttgagattctcagcatatttgtttgctttgtttatagattcatggagctttcctgaatttctattcacaattagatgcttcacagtaataagatattgcttattaccttttttcacataaagagcagtaccaaagtcttgtttatcttcactgtaacattttaaatgaacaattgatttttctattcttttcaaatccatatttctctcaccacttctagaattaatctgaataatataatatgaacaaaagtaacttaatgaaacctatccttttttcttctgtttacttgccttccaatccatatactcatggaatactgtaggtcctgtcacatcgtattttctaccaatccgccacaactcatcttgcatatctttttcaatatcttcccatgatctatgcccttgtttctctaaaaaatcattaaattcttttaccattggcatcatattctcacctcccaccttattatcggttaaggagtgtgataaaggaactatttgcaaaatttgtcgaacgaaagcacttttcataaataggtggcaaccgtaagacaaaaaaacacccttttaacagggtgctcatttccgcctatgtttttggaaatctaaaatatcctctttcagaaaaagcctgtcccggggcatttctttcatcggctctaattccccggtctttactaactggttcagatactgacgggtgaaccccaatatctcaagcgcctcacttgtattgagtatctcttcattcaggaatttcttgattgcgtcacgctctttaggcttgtacatttttgaatcatccttttttctcacgatatttcaagtaaagggaaaatgctttctcgatgatcgaaacaacaaataaaatgatcagactaatgtcgagagccgttttcaacggtcccgctgccacatcctgacggaaaaacagcatatacgccagggcgagaagaacaacaatatcagtagtggactgtacacttttcatttttttgaaagtggctggctttcaagtatttttctttagtcgccgcatttgctatacttggagcaagggagaagcgctaccttctccctcggctcaaaatcatctgcgctttcttggacgtctgcgttttttgattttgggcttttttgctttaagcttttccctgatgatgaggactttctcaacaactgtgagagttgtgaggataatccccagtaccaatgcgatttcagccactttctttccctcctttctatacattaattatacatcgtttatttactcacgtcaagtaatttagtgggcttttttcattatttctccaataaaaaagagcctattcacgctaaacagaataggctgtgatctgctctatttttcattttcaggcgggaacgttcgatgttcttctgcacagttccttttttaatccccaataactgcgctatctcttcgaatgacatgttttgtacagcatgcatcatgaaaatgtctttttctctttcggtaagcacggatagggcatcagcgattctttccttatcccaatcacttacttctccctcagcttcttgaacgattgcgtattcttccggcagcgcatcaattaagcgaggttcagcaagaatcgtcctttgatatgcgtctcttctgtcagcacctcggcgtgcgcccggctgtcttccgttctgcagccattcaagagtgaattcaatatcgctgatcatgctactgataatctttttgtcgttgatctgttcagccgtcagattgacttcagccgtatctttgtagagccgatacatttttcttgtttctcttaaagctcgtttgtactcaatgattaaatcttgcattctgattcctccctttatttgcgcttaaatgcgccgcccttgcctcgtttaagtgtttgcatgtttgtgttcatcatttgttgccagaaacgatctgagcgctcctgcatgtttttattgggctttttctttttctgcttcatgtcatccctccgttcaaataaaaaacggacaccaatcagagcacagtgattctgtgcaatgatcagtgtccgcaggctttccgtcttggacttattcagttaaagcagcacatatgtagcaatgttcccgatgatcgctactatacaaattgcagttaagtgatttcttagctgtgaatccttatcctctcctataactcccataagagagactatcaggaccagcaagagagctattttaaaggctattaacatctctctcctcctaattaagacccatttgattcattccggatttaacagctagaggcaccacgtccgccggctccacatatggattcttcttgtattcctgatagtaagccacaatcagctttgacgtatggctaacaagctgcagttgtaaaggcatacccttttttaattcatcaacaatcatttgaagttcaatctcagaaaatccgttcatttgtcttccctcttctctatatacttatcaatatcttgaaaaaacgccgcggccgtgaatgcgatgattgcgcctattaacgtgatgtttgctttcatgtccggcctgtattcgtactggaaataaaaccagaaacctaaccccatcagcataaaaactattctcagcgccatcgaatcccccttatttgatttgaaattttgctgattcaaatgttccgatatagttccacttgccggaatcagagtagcagtccagctgaatgacataggtccctttcccggtcttattccggatcgttttcacgttgaatgatttcagaggcgttgccgttttgaagctgcctcgctgtaccagattcgtttcagtaagcccgccgccgctacgcttcttgtatacgccggccgtgtaataaagagtgcttgagccttttttctcggctttccagtccaccgttgaggcgccggccgtgtaagtcgcggcatccgtaaacacccggccgctgtacccggattcattttgccagccggaccatgctgcggaagcagacggcgcaacggccgcggctcccataagtaatacagctgatagaatgattgatttgaatagttttttcattattttccccttcctagttcacaaataattaacatttatttacaaggataatcattattttgctcgaattattactgtgttcaataaaaaacctaaggagtgtttaaaatgaatttcaaaaagactgctgttactgcactagcgattcctgtattagctttttccattagtggtatggcttccgctaaggagataactcctcaaaaaaatgaaacgcaaacaactatatctcctggtccaattaaagcctattacgatacctttgaagtgagagccgggggttctaaacaattagatgccaaatatttaggatcaggattcgcttatcattcagataatagcgctgttttcacagtagataccaatgggcttgtccgtggcaataaagctggaaatgcatatttaactatattcaaaaatggatcagtatacggtcagttacacgtatttgtctattaattttctaatagaagagcattctaatatgctcttctattttccacttcaccacctatgcagcgcccacaatgcgggcagcgggcatctgcgcggatttctaaatcaagttttttataatctcagtccgggcaatgatattcgatcatttactatccgcccattcatcaaagctgtaggggtaatcaacactttcaatgaaaccaatctccttcgccttctgacggattttcatacatccttcatagctgtaagcccatatttctttataatccctcagctcgccgcatttccctgttatgatgaattttctgaagctgttgaccagttgccacatgttgcccccatgcgaaaagccgtttgaactgccgtatcccaattcatacgggtaaacatcagcgcccgtgtaatcatcaacgaagaacagttttttcttaaatctgaaatacgctatgcgatcctttgacttgcggtagaatgtacgatgatcaatgcttgcgataagcttgatcaaatcgtttatgtcgttcattcgtttcaattgctctgctgttggcattgggttccctcctgatcaaataagctgagttgtgtgattttatagttaaatagcaataattcttcagccccgcggctttttccggatccgccgacaacctgtttgtatgcggaaaaggtttctgactcccagttcgggtagatctcgagtatcaaaggatcatcgtaataagaaagaaccactttccctttgacctgattaagcagccgggccagttcccgatgatcctcttcgttaaagccgccagcataaaaccgttcacgcccaacatatggcggatccacataaaacaaagtatccgggctatcgtatttctcgatgatgttacgaaaatccttacattcgatcatgacgcccttcatacggttggcgaaagactcgaaggcagcgcaggcgcttatgtatccgccagcagggttctgcccgctttgtgtgctatgcctccagcctgtctgcggcacttcctccacgttccccttactaatgccggagcgattcatataaaaccacctgacagcccggtcaaaatcattttgcgggtaatcttcagttttccatttctcatagagcgcccggctgtacggaatggattcgcaagcctgctgcatggcctttggatcctttctgacttgcatcaagaaattcaccacatggccgtcaatgtcgttatacacttcatgtcccatttgcggcttattcgctatgacatgagccgcgccgccgaaaggctcgacgtacaccttatgggcgggcattttatttatgatgtgatcggcgtatcgacctttgccgccaaaccagattaacggtgagcgtgccatcccttaacccccgatcaaattcggcagcacggagatagcgaagaagaaaagccccacgcatgccccgaccagccagatatttgttttatcccgtttagcgataatggtatggtcaccgatcattttcagatcgtcagaccgagcgaccagcgtcgggatgtaatccgggtgaacctttaaaagctcggccgcctgctcgacggtcatcgcttcgtccttcgtggccttcacgttccgttgtagttcgacttgtaatggcatcattttgcagcaccgcctaacatttcgggattctgatgtacgttgccgattaactcaccatacatttgaacaaaatcccaacgtattccacccgcataaaatccggcatcatcttctgaccatttaacgactagattaaacacccggccgtgtgatttataacagataatatctcccgcatatatttctttttccataagctttttgcccgtccataaatcgcggctgatcaactcgtaaccaaactcttcacaaaagacgggagacagtttgcgcgccgggcgttcttcaagctgactgatatagtacgttttcaattcaacattgcctgtttccttatgtcggaatacgtatcggatttttatgttattcattccgcagccccctccaatgcttttctggccgtttgccctccgtcgagttcgacagcaggcggacagtcttcaaattcgtttgtatacgtcgtttcattggcgtaaaattctaatgcgtttctataacgcttgttctccgcctgtagcaacttaatatcttcctgagcctgccgaaactgaatgaccgtgacatcctgctggcgctggtgctcccgattcatagcctgttgcatgattaactcttccgcgagcttttcggctgctgcttctaaagatatttgctccggtgtactggccgccgttttcgaaagggtgcaaatgtaagagccggtatataaaacctcaccttttgacaagttgattttgaattctttcatgcccgggcctcccggtctaaaagacatgttttgcatacaacccattgagctgaataatatatttttccgcagcgttcacacttgcgggcaatttcgttttgatacattttccgttcctcccccgcaggggaaaacccctgctaattgaatttatggccgatctcgtaatcacaacgagccaggccgccttttattgtttgaatgattgttttaccgtgttccggggcgtccattagatgagcagtcccttcagtgccatctaaaacgatgatgcggactttccccggctcgatgctttgctgaatagttgtttcatgattttttatttctgtcggcttgttcactctggccgccccctgtgctatgatagaagtaccagttcatatcagagcatcggggccacggcttcggtgcttttttacgttttacgacggcagccgcatcgttactccggcagatggttttaattcctcgcggtaaatgatcggatgcttttcgatgtaagctgccaattgctccggcgtcattttccacttcttaactggaccaggcttgtatcggttgatttcttcttgcatagcgataacctcctgaattgatttagttctcaagcatcaaactttctccacaaagcgttatggcaggatttccgttataatgacttccacccggggctcttcactgtaaaacttgctaactttcagatcgactacctggctatcatcccggtaaatcagatgattcagggcgtctttaactccctttacatagttgtcaacgtccggctttgttacgggacgcaggagacccttttccgcattttctctttttgtcttggaattagaaatttctttcgtcattggtctgaatactctgacatccattgccacaggtcccgtaataacttgttttggccgatactgtgacgccaccagcgcaacatattgtttaaaattctttgatttcaaaggatcacgcattttaaccttgccatttataacagatcccctcggccttccctgtgcaacaggctcgccgtaaactataaactgaatggaatccaaccgtcattacctcccgtcaatttgttcccagtgctgaatctgcttttccttgtacggcgctgtgaggatgatggccggcagcagtataaccgctttaagcactgtgcatcagctccatttgtttgattttttcctcaagcacccggatcgccggggtaaggtcctggccggccgtttgctcagcaggcccgaacacgtacatgccgccggttgctgtgaagttcgctttttccgtcattcccaatctcctaacctatggtttaattgcatccgatcgcccttgatggtcactgtgtaatctctgcacatttgatgaatgcgggagcccagcgcctcgtctatgtccaaaatttcccccgtatcaagctcggaagagattagcagaggcttatgattcaggtaccgataattcacaaccgattgaatttgttccacttgccaatccgtcgcccgcggctccccctttactggtttgaataagtcatcaatgaacagaacttcagctttccgcatagcgtcgagctttgtttccagctgatcaaagtcatttcgcagatcgcccattccctcaacgtacgggaaatacatgcagtaaattgattttttcttaatcaggttgttcatgatcgccgttaacaagtgcgtttttccgctgcccggctgcccgagcaaagcgatactgtttgaacgttttcccttgatgctctgaaaatccttatagtattccaccgcgcactcataagcgtccttgatcatatccggcttcccgtccttaatgaagtttccaaaaaggagcttttcgaattcctccgtgatgccgctggccttcataagccgggcgatctttttccgcttcacacactcgcattgcttggaaaatgtggttttccattctcgggccttatccggcaagcatactttccccgcaagataatcctcttctctgaccatttgatcaggggccaggctttccattgtcttatgctcttttctcaattggcgctcggtgtcttggtgaatacggtaaacaataatgcccttatccttgcagtcagagcactcgtattcagccttttcttctgaggcggcctgtcccgttgaagatgctgctgaccgatcccggagcttggttagaattgccttcattgccgcgtccatatcttgcgttttgcgagcttccatactgctgtttctcctttcgtctctggctgaatgggtttgagaggatggcttcaatgtaattcagattgacgttgttgcccttgaatctgaaagcctgtttcattgcctccatgactttctcttcaccgtaatcatccaccatatatccgagccgctgaacctccatcgtgccaatggtgcgggctgttttgttttcgaatagttcaaatgcgtttttcattttttcgtcaacctcctgctgtcctaaaggtattggagccgggtctatcttcttgttgtaatttccaagctgtatgtactcggcataattcaacaccgtcacaatgaaaccgcgtttttgcggcagccggtccagcttcaaatactcttgctttaccatccgatctaacgagtatttgatctgatcagaagaccagttgaagcgcttggctaaatctacaagcttaatgattgtctgcccgagctttagttcttgatctgccctgtactccgcccgtttgaataaataatcgtatattgtctcgtctcgtgaatctttaaatggcagccggggcaggaccacataccccaaaccttgcatatccatgccgctcacctacttcctttcacacagtgctgtcagagccttgaaatctacttctactaatctcagagacggctcatttgtctttaagtagtcagtcgtgtaccgggtatacaagtcctttctcaagtcgcgctgaaccgttttgaccagccagagataacaatgcgggataggaatcctgatcagctccctttccatcagctcaccaactccgaaaaatggatgatgctgttcagttgattagtggcccggcaatacttgcatttttcgcatcgctctggtttctctccgccgtgtttcacttgcaaaatccgatccatccgctgctcaatctcttcaagctctatttccagcctgccctcatcaatattgatgacagctttatcaggtggatcttcttttgaaacccctacgatcaggggctcaagccattcgctccgtccagtcatccgtttttcaatctctgcgtaaagcgccatctgagcgatgtatccgtatgcctcaacaaaagagcaatatcctatttccgggtcccaaactttctcccgcaatgaccgcgctgttttcagatcggagaaacggccgccagctgggttgtatacgtccagctttcctttccacggaacaccgaacaattcagcagttacgatgacttccttttctccttgaagaacaaacatacagagatcatcattttgaatcgcctcaatcatcagatcagctaactgatactgcttgtacagctggcccttttgtgtaaaaagtgatggggtgttctttttaaattcatcaaaagcctgttcaccctcaagccaggcatgaacgtattggccgaagaggagcgcctccgatgtgggcggcgtccattctccgttcaactttgccatcgtggcagcctcgcattgcaaaaagcttttatattgagaatttgacatgtagtgtctatcaatctcgttagagtaataattcttcttgttcagcgccggtatccgcattagcaggatcacccgccttttctttactatcagcaggcttgtcagcttgctctttcagctttttgaattcttcttcagcctttgatttagtcgcgctagtggccttcacattgaagtaatcctctttctttgccatcccatcacgcagggccgtgtaaatacgaccaattttcaggaaatcttgctcagtgaaggcatcaacattactgccgatgtactcctgaatcatttccttagtgatgccaaactcttttttaaaaagggagaaggcacttctgagtcggtcttccagtggttccttatgtccactaatcaatgttttttgacacatatctaccgccgcatcaacgatgtcgcccggaatcactccaagtatgcaagcacgaacccggcgggctccttgattggcaaccatttcgtaaatatcccttggatcatcaagtttggtaatggcgccccgtgccttccgttcatgcttcacagtgaaaattttggtttgccgggtattcgtttcaagatcccaagcgtaagccatgacagatgattcaccggccttttgttccaactccataattccgtaatcaatgttcccccagttctgtgccaaggcctcagccagccggatggatgggccggaaacctttgtgccgccgcgcggatattcatataccgcattctcagccaatagcctccgctcgcatgcttttttaatccggtcaaaagccgcgtatacgtcccgtgggaatttctttgcgataaccattgccgcttgtacttcttgagcctgtcggcttaccatcgcttccatagtcacgccagtagcctgctggggcgccggcatgtaatctgagtaatccacctgtgataatccattcattgtgcttctgccacctttcttttatatgcttccgttccaagccgctgccattcccgatagtgatccattgaagggaaactaaactgcgctttaccgtttttggagaatacaattgagccgccgacctgccttaaacgtcgctgatcctccgcacgctcactgaatgccactttaactgctttagccatgtataaaacctccattgttttttatggggcgttttggtataataggaatacaatcaattatcaaaacgccttacctagtccactctgccaagtgggcttttttattgctcatttttaaattcaaaaccaagatgctccttcagataccgctcaaggttttccctcaagatgatttcaccctcagcactatctatcacgtaatcatcgaaagccgttacttcatccccaaagtaatccttttgcgtgtccggctcagtcagtttgtcatgccagttgttcaagaccatcggattttcaatattcattgtgaacacctacttacaacactcaggtgaatcccgcgggccgccatatttaagacagtttgatgtaagcgccctttattcgtcagccggtttatatcctctgtaagaaccttgatgctccctgcaagactgatagcttcttcataatcgccatcccgcaacgcctccgcaagcatgatagagagcctttccgccgactcgattttcctttttgctgaatctgcatctgctttaagaaactgattgattttcataccagcaccgcctgcctttcttctgttttcgccattgcaacctgactcattagcgctttccgcgtccacctttcggccagttccttcatgttcagtccatgactacgggccagcgaatatatcagcgttttatttgctgggatcagatcaaaaatctgctttatatcggccatgggcagttcttcaggttgtcggcctggcctatcgtttgccaaccagcgcgctaaatgccttgttgcttgtaatgcttcttcaagctggtgaatcatattgattaccgccgcgcttgcactctcgttaagtgctggatcaattggcgccgccgtcgtcgggtgcaatttgaagagataatgtaccagatcaatatgttcgtatgcctcgcacgcctcaaaccacttaatgcataattccggggtaagcttactgaatccattttcaacgtccgaaacatatcgctgatcctttccccctatcaaattaccgatctgatactgtgcaagtcctgccgctttgcggacactacgcatgatccggggtagattatgcaaattgtatgggttgttctccatatgtttgcctcctgatatatccagttgttcactggtaaaatttaattaatgaagggacaagctagtccttttctcgaacattaatctccccaaatttgtggagattgtttcaagctgtttctgatgaaatgaatttattcacaaaataaatctgaccttttcccgtaacctttggcgttcgggtagttctaattgaaccatcagggttattcattgttctcttcttaatttcaaagagacccaaatccatacttcgctgtgttggtagattgaaagactcgcctgtcttacgaattaaataaccattatcacggagccattgaaataacttgttaggtccaatctttacgccgttctgttgaatgattttcgctaactcgccaacaagcacagatgattcagatgcttccacggcttcggcgaaaagagcttttggcttcatagattcaatttgcttattttgctcctttagtgcgtgaagagttgttttgaaaaataatttggtattttcgtctgcgttggacaaatacgtctgaatgaactgttcatcatttgcgacatatcccccggtttttctgattgtgggtataacttcaaaggctaaccaatcttgaaattgttcggcaatttgattagatgctctaaaagccagcttgtacaccaatggttcaggaataaaatcacctttctctacttctggaaagttatccggaaggtaagtattcacacggctccatcggattgttacgttgccacttttggcaacggtagtgaggcctaagttccgagcaacttgctcggcatcaaaaaggatttgatcattctcaattttggctgcaacttcgaaaatttcatttttgaatgtttgtaaattattcatgccgaagctcctttctgatagtatgcggtgttctcagcaacccaacgcgtgttgctctcaatccatttaaaaagcaaagtcgtagggatttttttgccacattcttcgttaaccggaaaatccggacgggccatcagttccgccattttagtgggaccgcaccgcagcacctccatcgcttcagttctcgtcaagatgtgaggaagctcgttcaaagagctgagccgctctaccagcatgtctgttgctctatcagcaattttggcagctatctgttcaatgaatttctcatcgtattgcatagtgaacatataaaaaacctcctttacaatgagctttataatctctcactttcatgtggtaaaatatgcatggaaggtggtgagatttaatggcttctactaaggtttacgcttgcctttgtggtgaatgggttgacttgactagtgatccggactgcaaaataggtgaatctatgtcttctccatacatatggtgggaagaaggtgcttcaatttggagccctaattctaaagaagagcacacgatgtatcagcaagattacgttaatatttattacaaaaatgctgaatatcgcattcacccaatgtttatccaaatcaagtattcatcctaaattcacgtttaaggttagcttctaacagttctgggtcgtcaaactgcaatttggcggctttagaactgaacagtacatcgacatgttgtttaacacggctccactcggattgggacataccattcaacaaatttttaatttgttccagctttttttgatccataacttcgacctcctatactgtttttttgtaactttcattcctaagcagttttctcgttaccctttttgtgtaacttttcattaaaaaaaagctcatcgacttcttcattcagtaactcggatatttggtgtgctttttcaagacttggctttgtacgccccatttctatatttgcataaccgcttgcgtatctatagccaagcttttttgccataaaagtttgggtctttccttgagaaagtcttgtagcccgtaatttttctagcactattaactcaccaccttactcttttcgtgtaactcgttaaatacataataatatacacaataagggtaagtcaacatatttttattctttttgtgtaagtaattatctcttgtgtgtaaaccgtgttaaaatttacacaccaaataaaaaaaggtgtataataatggataatataacagggaaaatcttaactgaattaagagaaaagaaaggctggagcaaatctttcgtcgcaaaaaaattaggtattaaaacaatgtctacatatgcgaactgggaatacggtttaaggaaaccagatggagaaatgctcgttagacttgcaagtttgtatggtgtaacaactgattatctcctaactggcaaagaacctacttttaataatgacctttttgatgatcctgatctacagatcgcctttagagaagcgagtgacttctcagaagaaagacaaaaacaagcaattgattttataaagtacctcaaagagaaagaagaacgtgaaggccgtaagcctaaaaagtaactaactgccgaaacctttatttatattattgttattatgttatttctgtttactaataagatcaggattggatcgggattagaaccgaactggatcggaaaagaatttttcaccagtaggttgaagccaattatatcaagggaaatagaattctttctcatctggattgcatctggattcaaacgggatctgatcagaaaaaaatatactcaagtgtattacttataaaggggaaattaaatttgtcttttttgatggaaaatggcgaaatctataactgtcagtttaaaaaacgcatgaaggcttctaaaaatttcttgaaaacttatgaagcagctaaacctctgattgatgaaagaaatgaaacaattcatgaactcgtttgcggaactatgaagagtgacgcgacatgggggcattttattgctacagaaaatcaagtatatttcattgtcttgaaaaagaaaaaaccaattttaaagaattggccctataaagaaataattaaaattactgccagtcgcaagccattaattggacataagattgattttaaaacagccgaagaagacttaaacatcaattcaatatcagaaggtgatattgacggctttatcaaatatgttgaatcaaaaatctctggcaatgaggaaagatacgaaagtgaaaaagaggatttaaagaaagaaactaaagaatactattttaaatcagcaaaaacaacaatcacacttgatggaaactatataagagtagcaagaaaaggcgctgttaacactatcacacgagggtatagtggggagaaatcttatagaatcagtgaactgtccgggcttcaaataaaaaaacctggattagtaacctcaggctattttcaatttttaacgccagctgctaatgaaacaagtggactctgggacgcaatacaagacgataactccttcacttttggcgcaaatgaactgcctatggttttagaaattcaaaaatacatagaagaacatcagtctattccagctccaacaataccaccagctcctgcccctactgtatctgcagctgatgaattgaaaaaatataaagaattgttggatatggatgctatcactcaagaagaatatgaaattaaaaagaaacagctattgaatttatgacagcccttcttcctcgggcttttctttcacaccaaaaacagaacatacattccctacatggtggtgtttttaatgtcaatccagttatcgtatcttgaagaagaagtgaaaaaaatctattacaaattaaatattgagactcctgaagacattgatttagaaaggattgccgcggcatttcgtatctggctgcattatgagcaaagagaaagctgcatgtttcaaattaacggtgagtatagcgttgtccttgatgctcgagcctctccgcaagaacagtggcaagactttgttcatgagctagggcatgtgattaaacattgcggaaaccagttcaacatgaatcgtatgtttcgccagttgcaagagtatcaggctaatagctttatgtatcatttctgtgtacctagttttatgcttgaaaagatttcgttgccacgcatgaaatcagaggttataaaattaataggtgatacctttaatgttacatatcaatttgctgctaaacggctcgatatgtatacaagaaaacagttctcattcttgatgtataaacagctctttaaaactattcattgaaaaattggggtgacaaaatgtatacagaggaattgatcaagggtaaaaaatggctggctgttggtgacggacctcgtgatcccgttaccggtaaacgcaaacaaattgcgcggcgtggcaaaacaaaaaaagaagctgaacaaagagttagagatgctattgatgccttaaaagaagatggcattgatgaatcagttgttaaaaaaatgactttcgaaaagcttgctgccgaatggttgaacgaatatgctctcacaggaaagaaaaaagcaactctgcgtattcgaaggaaagaaattaacatcttaaaccggtatatcgctaaaatcaatatcgctcaggtaacaggaagaaaatatcaaaaaatactcaacgatctcactgatcaagaatatgcccgtaccaccattagtggtgtgcatacgacagccggaatgatttttaaatacgctgtaaaggtgaagcttttaaaagataatccagtggctggcgctgtagttcctaaaaagagaatgacagtagaagatattgaaagtagtaaaatagagcaaaaatatcttgaaagggaagaacttgaagagttcctcttagcagtaaaagtccatggtttggaaatggaccttgaacgattttacttgctcgcttttacaggcatgcgttcaggggaaatgtgcgccctcaaacttcctgatataaattttgaaacaaaagagctgcgtatcactaaaaccatatattccgaagataacaatatgagaaattatgaattaactccgccgaaaacagccggatcggtgcgaactatcactctcgacgatcagataatagatatattgaaggcacatgtaaccaaacaaaagaagttgcgcctacagtccaggattgatccaagcgaataccacgacggtaatttcctatttgctcgtgagaatggctatccctttttaccaaaaaatatcattgtaagaatggaaagaatactggaaaaaacatcaattaaaaaacatgctactccccatatatttagacacacgtatatcagcatgctggccgaggcaaaagttgacttgccaactgtaatggaaagagttgggcatgacgacatgaaaacaacgatgaagatttatactcatgtaaccaaaaaaatgaaagaggatgcctcccacaaagtccagcagacttttggaaacatcctcaatttcgggatttcataaagaaatgttatttttttgttattttttcggttaattggggtgatgaaaaacggtcaaacccttggtgtatcaagggttttttccgtttgattacatcatgccgcccataccgcccatgccgcccatgtcaggcattcctgcgccgccggcgttttcttccggtttgtcagcgacaacggcttcagttgttaagagcattgctgctacagaagctgcgttttgcagggctgaacgtgtaacttttgtcgggtcaacgatacctttttcgatcatgtttacccattcgccggttgcagcgttgaagcctacgccgattttttcatttttcaggcgctcaacgatgacagatccttcaagtcctgcattgtgtgcgatttgacggatcggctcttcaagcgcgcgaagcacgatgttgatacctgtttgcgcatcgccttcagcttccactgcagcgactttgttgtatacattgacaagcgctgtaccaccgccggatacgataccttcttcaacagctgcgcgagttgagttgagggcgtcttcgatgcgaagtttacgctctttcagctcagtttcagtcgcagcgccgactttgatgacagctacgccgccggcaagtttcgcaagacgctcttgtaatttttctctgtcgaattcagaagttgtttcttccacttgagcgcggatttggttgacgcgagctgcgattttttcagtgtcgccggcgccttctacgattgttgtgttttctttcgttactacaactttagaagcgcgtcccaattgtccgatttcagtagatttcaggtcaaggcctaagtcttctgtgattacttctccgcctgtaagaacagagatgtcttcaagcattgctttacggcggtcaccgaagccaggagctttaacggcaacagcgttgaatgtgccgcgaagtttgttgacaacgagtgtagcaagagcttcaccttcaacatcttcagcgatcagaagcaatggtttgccttgctgtacaacttgctcaagcacaggaaggatttcttgaatgtttgtgatttttttgtctgtgattaagatgtaaggattgtcaagaaccgcttccatcttatcagagtcagtcaccatgtaaggagacgcatatccgcggtcgaattgcataccttccacaacttcaagctcagttgtgaagcctttagactcttcgattgtgatgacgccgtcgtttcctacgcgctccattgcttcagcgataaggcttccgacttcctcatcagcagcagagatcgcagcaacctgagcgatagactctttgccttcgatcggcttagaaatttcttttaagttttcgattgccacggttacggcttgttccatacctttacgtacgccgacagggttagctcccgcagttacgtttttcaggccttcgcggatcatagcctgcgcaagtacagtcgcagtcgtcgtaccgtcaccggcaacgtcgtttgttttgctggctacttcagctacaagcttcgcacccatgttttcaaacgcgtcttcaagttcaatttcttttgcgattgtcacaccgtcatttgtaattaacggagaaccgaattttttctccagaaccacgttacgtccttttggccctaaagttacttttacagcgtcagcaagcgcatcgacaccgcgaagcatagcgcggcgtgcttcttcactaaacttaatatcttttgccatgttaacgaaacctcctcgaatttttaaaaatatttatttgcttagccgattacagctaaaatgtcgctttcacgtaagattaagtattcagtaccttcgtatttcacttcagtaccggcgtattttgagaagataatgcggtcgccctcttttacttctaaagcaacgcgctctccgctttccaacacgcgacctgaaccggctgccacgattttgccttcttgcggcttttcttttgcagaatccggtaatacgattccgctggcagttttttcttcagattctacgagttcaatgacaacgcgatcacctaatggctttaacaatgtaataacctcctcaatagtatgaatatgtaattttagcactcagctctaaagagtgctaacacagttattataataaagaatctcacttccaatttcaagtcataagaataaaaaattttcacgcttacatgattctctctcgcactgattttctccttttttcacgtcaagttcacttgtgttacaataagaacaaataagttgattttataggataaaggagtacatatcatttgagaaaacagtattggtatatcattttgacatatgttatcatgcagctttccgcattgatcggcattcctttaatgtacaaattcggctatgcgggcgggcaccctacgaatgcgaatctcaccatggctcaggggatttattccgtcgtaagcttttttatctgcctgattatcgttctcttgattttgagaaccgcgccgaaacagacattaagaaacgggaagaaagcatccgccggcatgtccgttctctgggcggtcgcgggaatatggctcgctttattttctcagggaatcgccgggatgattgagcagtatgtctttcatgtgggcagcggttccgaaaacacgaaagccattcttaacattattaaagccatgccgctcatgattatcgtttcttctatcgtcgggccgattcttgaagaaatcattttccggaagatcatcttcggtgtattatatgaaaaaacgaatttctttatcgccggactgatcagttccgtcattttcggcattgtgcatcaagacctcacgcacctgctgctgtatacggccatgggctttacctttgcgttcttgtatgtgcagacgaaacggattattgtgccgatattcgcccatgtcatgatgaataccattgtcgtggtcatgcagctcggccccgcccaaaaatatattgaacagcatagtgagcaaatgcaattaattattggaggattgtttgtatgaggaacccaatgacttggggcttgatttatttcgcagtcggctgtatctttacgtatttggccgcaagctctccgggaagcatgtggtctttttattccatactgctgatggttttcgccgcttataatatcagcatctcgtttaaaatgttcgccttctcatttaaagtgaagaaaaaccaaaaataataaaagaaaagccatttctcatcattgagaaatggctttttttatgctgatacgtcctggtcagattcactgccggtctgccttttccgatacgccgcttttgaaatcaggatactgatctcgtataaaatgcaaagcggaatggtaatcatcaagtgagacagcagctcaggcggcgcaatcatcgcggcgatcacgagcagcacaaaatatgcgtacttcctgatcttcgataaaaacctcggcgtgataacaccgagtctcgttaaaaacatgatcagcaccggcatctgaaacagcagcccgaacggaatcgtcagctgcagcagaaaatgaaagtactcggtaatcccgattacctggttgacatccaggtcattcgagacccgcttcataaaatcaacgaccagcggaaataaaatataataagaaaacgacacaccgccgacaaacagcacgatcgaaatcggaatatagctgagtgttactttgcgctccttctcatacagacccgggctgacaaacgcccaaatctgatagagaataatcggcgaagtcaaaatgatgccgatgataaacgcgaactgcaaaaagataaacagcggatccgtcaggttaaaagcattaagggtgagctcttttacttcatcggctttttgaagatacacaatgataggttttgccagaaaaaagccggcaataaagaaaaccgtaaaggataacgccacaatcagcaatcgtttccgaagttcggcaatatgctccacaagcgtcatttgattcactctcatacgcgtcatcctatcttactgttcttctttctttttttcctcttcttcaccggctaatcccttagtagcgttcttaaattcacgaagcgtgtcccccgccgcttttcctaattcgggaagcttcttcggaccgaaaataatcaccgccaccacaccgataaccgccaggcttccaggaccgatcatgtgcagctcctcctttcgctattcaatttcttccaaaacagaataatgctttaagaaataaaccaatgattgaagctctactgctaaatctatatgatgaattcgaatgtgatccggcacattcaaacgggccggcgtaaagttaaggattcccttgattccgagtgacacgagccggtcggtgattgactgggcggcaaccgccggaacggtaagaatcgccacgggttcatcctttatgtgaagctctaaatcattaagatcaaagacaggcacaccgcctacctcagttcctattttactctgattcacatcaaaagccatagatatttttgtgttattattttttgtgaaattatagtgaagaaacgccgtccctaaatttccgacaccgatcaaaatgacgttcgtcgtttcatcctgatccagtgtttttctgaaaaatgacagcaggtaatccacattatagccgtatccttttttgccgagcgccccgaaataggaaaaatcccggcggatcgtggccgaatcgacttttaccgcatcgctcagttcagccgatgaaacgcgctgctttcctgacgcgtgtaaattctttaaaaagcgataataaagcggcagccgttttgccgtcgcctgtggaatttttgattgatccttgttcatgattggtcctccactttatactcagatgcatctcttttaaaatcaccgtttttgcctcctgttttttccatgaggcaggtcgggccgatgaccattcctttatccagcgccttgcacatgtcatacacggtcaaagcgcagactgaagcggaagttagcgcttccatttccacacctgtactccctttcgtttttacgcttgcctgtatatgaagaacggcttcggaatccttttcctcccagccgaatgaaatgtcgacgctgcttaaagaaagcgggtggcacatcgggataatcgctgacgtctgctttgcggccataattcctgccacctgtgcgacagccagcacgtctccttttccgatctcgcggtttttgattctgctgtacacgtcatgcttcatgtgtacgctggatatcgcagcggcagtacggactgttgaagatttatcgcttatatccaccatgcgggcacggccttcttcattaaaatgagaaaatccattcatatttaaactctccttacttctgatcatacactattttctccctgatgtcttatcctataatgttccaattctgatgtattgtttgctgacagcaggttgataagctacacttaacttattataacagaggtgaaataatatgatgatcttacaaattaatcagctatccaaatcttttggcgctgatcctattttaaacaatataaagcttgaagtcagatctcgggatcgcatcgccatagtaggcagaaacggagccggcaaatcaactctccttaaaattatcgcaggtcacctttcatatgaaaagggtgaattaatcaaaccgaaagaattaacgatgggatatcttgcccagcacacaggcttggaatcccagcttaccataaaagaagaactgctgagcgtttttgatttcctgaaagcaatggaaaaagagatgcgctctattgaagaaaagatggccacggccgccccgcggagcttgaaacgctgatgaaaacctatgacaggcttcagcaggatttcaaggataaaggcggctatcaatatgaagcggacgtccgatctatccttcacggactcggcttcggaaaatttgacgattccgtgaaagtgcaaagcctgagcggcggtcagaaaacaaggcttgcgctcggaaaactgctgctgacccagcctgatctgcttattctggatgaaccgacgaaccatctcgacatcgatacgcttacatggcttgagcattatttacagggatattcaggcgcaatcctgatcgtttcccacgacagatactttcttgataaagtcgtcagccaagtgtacgaggtctcacggacagaaagcaaaaaatacctcggcaactacagcgcctatttagaacaaaaagctgagcagtatgagaaagacctgaagctgtatgaaaaacagcaggacgaaatcgccaagcttcaagattttgtcgaccgcaatctggccagagcttctacaacgaaaagagcccaaagcagacgaaaacagcttgaacggatggacgtcatggcaaagccgctcggggatgagaaatccgccgccttccgttttgacattacaaaacagagcggaaacgacgtcctgcgcgtacaggatctttccatcagctatgacggccagccgccgctcttgaaaaacctgaccttcggcattacaagaggcgaaagcgccgccctcgtcggaccgaacggaatcggcaaatcaaccttgctgaaaacgattatgaatacaatcagtccggaatccgggtcgatcacgtacggttccaatgtcacaatcggctattacgatcaggagcaggctgaactgacatcgtccaaacgcgtgctggacgagctgtgggatgaatatccggacatgccggaaaaagaaatcagaacatgcctcggcaactttctgttcagcggagacgatgtcctgaaaccggtccgttcgttaagcggcggggagaaagcaagagtcgcgcttgccaagctgatgcttcaaaaagcaaactttctcatccttgatgagccgacaaaccaccttgacctggacagtaaagaggtgctggaaaacgccctgatcgactacccgggaacactgttatttgtatcgcatgaccgctactttattaacaggatcgccacaagagtgctggagctgtcacctgatcatgcagaagaatatttgggagactatgattattacaccgagaaaaaagcacagcagctggaactggaagaaatgaagcggcaggaaaaggagcagactcagcctgccggcaaggtcaaacaggatacgaaaagaacttacgaggaagaaaaagaatggaagaagaaagaacggcagcgcctgagacgcattgaagaaatcgaagcggccgtctcatccgccgaagagaaaatcagtgccaatgaggagctgctgtgcgatcctgacgtgtatcaggatcatgaaaaagtacagaccattcacgcggagaatgaagcccagaatcaaaagctcgaaaacttattagcagaatgggaggaactctcctcagaagaatagaaaaagtcaagcacctctttaaggggtgcttttttatccacagctatcctccttgtcagccatttaagtaagcgttttatacacactatccacaaaattttctgactttatccactttactaacaactttcagtcccttatccagactggatttctgaatatattcacaatcctgtggatatgttagaattatctgttaataagtaaaaaaaagcctcacgttttacaacgtgagacgatcaaaggatgttaattccaaaccgggctgtccgttcatatcgtacgagccccggatccccttttcaaaagcaacggttccggcagccgcaatcatcgctgcattgtccgtgcataaagaaagcggcgggatgacaagctcgggatctcccgaatggctgaattcctgctgcagtgcggctctcaaccctttgttagcggctacgccccctgcaagcagcacttgtttaaccctgtattctttcgcggccttagaggtttttgccgtcagtacatcaatgacactctgctgaaagcttgcggcaagatcctccggaggaatcacctcatttttttgcgaggcgttatgaagcgtgttaatcacggctgatttcaggccgctgaagctgaaattgtaagacccttcttccagccacgcacgcggaagcggaatggaatccgttcccgcagcagccagcttatcaatctgcggccctcccggataaggaagccccatcgttcttgccactttgtcgtaagcttcgcctgcggcatcatccagcgtttcaccgataacctcgaatgaaccgtgttctttcatataaaccaattccgtatgtccgcctgacacaaccaaagcaagcgccgggaactgaagctctcctatcagcctgtttgcataaatatggcccgcaatgtgatggacgccgactaacggtatttgatgggcaaagcttaacgcctttgccgcattgaccccgattaacagggctccgacaagtccgggtccttccgttacggcaatcgcatcaagatcatcaaagcccatctccgcctttgaaagagcttcctcaatcacaagggtaatctgctccacatgatgtctggacgctatttcaggcacgaccccgccgaaacgtttatggctttcaatttgagaagcgacaacgtttgaaatgatgtcttttccgttttttacgactgaggccgcagtttcatcacagcttgtttcgattcctaatacataaatatcttgtttttcactcatgtaatgtcacccacattaataacgcatcttccccgttatctgtatagtattgttttctgattcctccggcctgaagaccgaatttcttatataaggattgggcgggatgatttgagaccctgacttcgagagagagccttcttgcctttttttctctgcacaattctatcgcagagcgaaacagcgcttctcccaacgattggccccgatattccggcttaatggctatgttcgtaatctgcgcgtcatctataataatccagattccgcaataccccgccagacagccgtccttttcaatgacaaggtagtgggcatacggattttccaaaagctcatgataaaatgaatccttcgtccacggagaagtaaaggatgctgtttcaatttcataaatttgatcaatatcttccggccgcatgcttcgaatcgccgttttcgttttcatccctatcaccctatttttgagattccatccatttcgcttcagcctctgccagacgcaaataatccggaacaaggctgtggacatccgcttcttctttttccaagcctaaaaacgccagctctgacggccgcggattatgctgtgcagccgttcctatcactgcttgatttgtcagcccatgcagaatggtttcttcatgaatggctgtatcatgccctaaaaataaaaccggagacgctttttctttcagcatgtcgagccaatcagtcaaaagcacattctgatcaggaagaacggattgtaagcggccgtcctgatattcataaagtcccgtatatacctgtccgcgccgggcatcaaataacgggcagatcagtccttgaaagtgccgtccgttagccgccagcacctccaggctcgagacagcggaaaccggaagcttcagcgaccatgccaatgtttttgccagcgtcacaccgattctgacacctgtgtacgatccaggtcctttcgccaccgctattttcgtaaggtcctgcggtgttaggccgcaatccttcagcaatgaattgacagcaggcatcgcccgcacggaatgattcttttttaaatatgtaatatactccgccatcaccgttttctctcgaacgagcgcggcacccagcgtgtaatttgacgtatcaattgccagtattgtcatgtttatttatctcctcacaaagcgtttcataccgtgttccgcaagccgtaaaggtaatgtcccttgcctcatcaccggctctcttgatgacgatctgcagccgttcagcaggcagctgatcctgaattaaatgagcccattcaattaaacagacgccttgtccctcaaaatattcttcaagccctaagtcttcgctttcatcctccatacgatacacgtccatatgatatagaggaatcgaaccgtcatggtattcttttataattgtaaaagtcgggctgtttaccactctcgtgattcccagtccttcggcaaaaccctttgtaaaagtcgtttttcccgcgcctaagtcgccttccagtgtcaaaatgtctcccggctttgccaaagaagcggcaagcttggctacggctttcgtttcttcggggtttttcgttctccattgtaatgtcttcaaagtgagtcacccgtcttatttaaaatgattgtatccttttttctcaaggacgatttgtctctgatcattggctgtcaaaagaacacatgcttccttccgttcagataccgcccctatcttcgcaatcggaatgcccgattgagtgcagtaatcaagcagagaggtccactcttgctgagaaaccgttccaaccaattcaaaatcttcaccgccgaataacacccatttcttccactcagaatctgcctcaggcaaatccggatgcaccggcagaagttgttcttcaatttctatcgtaactgaacttgccgcagctatttcatgcagctcactggccaatccgtcactgatatcattcagagccgcgcgctgaagctgagagcagaagcggccgacttgaactctcggaacgggccgtttatgtttttggataaaataatcactcgtatgaaaagcagaaggatgtgtttctcccaacaaaagagacagtcctgctgcggacgagccgatatcccccgtaacaaacacaacatccccgggtcttgccgagcttcgcagacaagcgcaatccttctcaacttctccgatgacagtaacggtaattacggcttgaccggaagcggagacggtatctcccccgatcaaatccatttgatatagtttcgccagttccgccattccttcatacattgcctggacgtcagctttctgccagcaagaaggaaccgctagagacaccaaataaaacttcggaatgcctcccatcgccgccacgtcactaatgttaacagcaagcgccttataaccgatatcatgaggagaggaatactctaatttaaaatggacattctccaccattgtatcaaggcagacaatttgctgcatgtggggtgacgctgtataaaccgcaccatcatcaccgatccctacatcgacggaaggatgataatgcgaatgcggtgtaatactgtgaatcaaatcaaactcatccatatatctcccgtcttcctttctgacgctcttgtgaaatacagctctttctagtgtatcggattatgtttcaatatccaagactttaacgatataaaagaaagcttggttagataccaagctgccagcattaaaagaaaacacaaaaaaaacgaaaacatgatcgtttcgtttacaataaaaatggcggtccggacgggactcgaacccgcgacctcctgcgtgacaggcaggcattctaaccaactgaactaccggaccatttaatttttggttgcgggggcaggatttgaacctgcgaccttcgggttatgagcccgacgagctaccgaactgctccaccccgcgatgataaaattttagaaaagcttggcggcgtcctactctcacagggggaaacccccgactaccatcggcgctgaagagcttaacttccgtgttcggcatgggaacgggtgtgacctcttcgctatcgccaccaaaccattgagagtgttctctcaaaactagataacagtaagcatacattcaaattggttaagtcctcgatcgattagtatctgtcagctccatgtgtcgccacacttccacctcagacctatcaacctgatcatctttcagggatcttacttccttgcggaatgggaaatctcatcttgaggggggcttcatgcttagatgctttcagcacttatcccgtccgcacatagctacccagcgatgcccttggcagaacaactggtacaccagcggtgcgtccatcccggtcctctcgtactaaggacagctcctctcaaatttcctgcgcccgcgacggatagggaccgaactgtctcacgacgttctgaacccagctcgcgtaccgctttaatgggcgaacagcccaacccttgggaccgactacagccccaggatgcgatgagccgacatcgaggtgccaaacctccccgtcgatgtggactcttggggagataagcctgttatccccggggtagcttttatccgttgagcgatggcccttccatgcggaaccaccggatcactaagcccgactttcgtccctgctcgacttgtaggtctcgcagtcaagctcccttgtgcctttacactctgcgaatgatttccaaccattctgagggaacctttgggcgcctccgttaccttttaggaggcgaccgccccagtcaaactgcccacctgacactgtctccccgcccgataagggcggcgggttagaaggtcaatacagccagggtagtatcccaccgatgcctccaccgaagctggcgctccggtttccaaggctcctacctatcctgtacaagctgtaccaacattcaatatcaggctgcagtaaagctccacggggtctttccgtcctgtcgcgggtaacctgcatcttcacaggtactataatttcaccgagtctctcgttgagacagtgcccagatcgttgcgcctttcgtgcgggtcggaacttacccgacaaggaatttcgctaccttaggaccgttatagttacggccgccgtttactggggcttcaattcgcaccttcgcttacgctaagcgctcctcttaaccttccagcaccgggcaggcgtcagcccctatacttcgccttacggcttcgcagagacctgtgtttttgctaaacagtcgcctgggcctattcactgcggctctctcgggcttgcaccctaacagagcaccccttctcccgaagttacggggtcattttgccgagttccttaacgagagttctctcgatcaccttaggattctctcctcgcctacctgtgtcggtttgcggtacgggcacctctcacctcgctagaggcttttcttggcagtgtggaatcaggaacttcgctactataattcgctcgccatcacagctcagccttcacgggaaacggatttgcctatttcccagcctaactgcttggacgcggatatccaataccgcgcttaccctatcctcctgcgtccccccattgctcaaatggtgaggaggtggtacaggaatatcaacctgttatccatcgcctacgcctttcggcctcggcttaggtcccgactaaccctgagcggacgagccttcctcaggaaaccttaggcattcggtggaggggattctcacccctctttcgctactcataccggcattctcacttctaagcgctccacaagtccttccggtcttgcttcacagcccttagaacgctctcctaccactgttcgaagaacagtccgcagcttcggtgatacgtttagccccggtacattttcggcgcagagtcactcgaccagtgagctattacgcactctttaaatggtggctgcttctaagccaacatcctggttgtctaagcaactccacatccttttccacttaacgtatactttgggaccttagctggcggtctgggctgtttccctttcgactacggatcttatcactcgcagtctgactcccaaggataagtcatcggcattcggagtttgactgaattcggtaacccggtaggggcccctagtccaatcagtgctctacctccgagactcttaccttgaggctagccctaaagctatttcggagagaaccagctatctccaggttcgattggcatttcacccctacccacacctcatccccgcacttttcaacgtgcgtgggttcgggcctccattcagtgttacctgaacttcaccctggacatgggtagatcacctggtttcgggtctacgaccacgtactcaattcgccctattcagactcgctttcgctgcggctccgcatcttctgcttaaccttgcacgggatcgtaactcgccggttcattctacaaaaggcacgccatcacccgttaacgggctctgactacttgtaggcacacggtttcaggatctctttcactccccttccggggtgcttttcacctttccctcacggtactggttcactatcggtcactagggagtatttagccttgggagatggtcctcccggattccgacggaatttcacgtgttccgccgtactcaggatccactcaggagagaacgaagttttgactacagggctgttacctcctatggcgggcctttccagacctcttcatctacctcgttcctttgtaactccgtacagagtgtcctacaaccccaagaggcaagcctcttggtttgggctggtcccgtttcgctcgccgctactcagggaatcgcatttgctttctcttcctccgggtacttagatgtttcagttccccgggtctgccttctcatatcctatgtattcagatatggataccactccattacgagtggtgggtttccccattcggaaatctccggatcaaagcttgcttacagctccccgaagcatatcggtgttcgtcccgtccttcatcggctcctagtgccaaggcatccaccgtgcgccctttctaacttaaccgttaaaaagaatcactacgtgatatcttgcattactaattgaatgtgaattacttctgttatctagttttcaaagaacaatatctcgaagaatcgaatgatccttcaaaactaaacaagacagggaacgttctgtttataagacccaaggtcttatattccgttaaaatccttagaaaggaggtgatccagccgcaccttccgatacggctaccttgttacgacttcaccccaatcatctgtcccaccttcggcggctggctccataaaggttacctcaccgacttcgggtgttacaaactctcgtggtgtgacgggcggtgtgtacaaggcccgggaacgtattcaccgcggcatgctgatccgcgattactagcgattccagcttcacgcagtcgagttgcagactgcgatccgaactgagaacagatttgtgggattggcttaacctcgcggtttcgctgccctttgttctgtccattgtagcacgtgtgtagcccaggtcataaggggcatgatgatttgacgtcatccccaccttcctccggtttgtcaccggcagtcaccttagagtgcccaactgaatgctggcaactaagatcaagggttgcgctcgttgcgggacttaacccaacatctcacgacacgagctgacgacaaccatgcaccacctgtcactctgcccccgaaggggacgtcctatctctaggattgtcagaggatgtcaagacctggtaaggttcttcgcgttgcttcgaattaaaccacatgctccaccgcttgtgcgggcccccgtcaattcctttgagtttcagtcttgcgaccgtactccccaggcggagtgcttaatgcgttagctgcagcactaaggggcggaaaccccctaacacttagcactcatcgtttacggcgtggactaccagggtatctaatcctgttcgctccccacgctttcgctcctcagcgtcagttacagaccagagagtcgccttcgccactggtgttcctccacatctctacgcatttcaccgctacacgtggaattccactctcctcttctgcactcaagttccccagtttccaatgaccctccccggttgagccgggggctttcacatcagacttaagaaaccgcctgcgagccctttacgcccaataattccggacaacgcttgccacctacgtattaccgcggctgctggcacgtagttagccgtggctttctggttaggtaccgtcaaggtgccgccctatttgaacggcacttgttcttccctaacaacagagctttacgatccgaaaaccttcatcactcacgcggcgttgctccgtcagactttcgtccattgcggaagattccctactgctgcctcccgtaggagtctgggccgtgtctcagtcccagtgtggccgatcaccctctcaggtcggctacgcatcgtcgccttggtgagccgttacctcaccaactagctaatgcgccgcgggtccatctgtaagtggtagccgaagccaccttttatgtctgaaccatgcggttcagacaaccatccggtattagccccggtttcccggagttatcccagtcttacaggcaggttacccacgtgttactcacccgtccgccgctaacatcagggagcaagctcccatctgtccgctcgacttgcatgtattaggcacgccgccagcgttcgtcctgagccaggatcaaactctccgataaagtagtttgactgactacgcacatcgctgtgcgatttatttaaaactttgaattaacaggtacgttttgtcttgtttagttttcaaagatcattataatggagcgggtgatgagaatcgaactcacgacatcagcttggaaggctgaggttttaccactaaactacacccgcatttgaattggcgcgcccgagaggagtcgaacccctaaccttttgatccgtagtcaaacgctctatccaattgagctacgggcgcttatcaggcgacttaactatcatactaccaatcagttatgatgtcaagtgttattttatttcttttcgaagtcttttttctcgacctcatttattatacacgctttcgagaatttgtaaagtcttttttaaaaagatcattttctcatttgtcgttatcgctttgttcatcagcgacgtttaataatataccacgcactttaaattaggtcaacacttttacgaaactttttttccgcttattattcccttctatataataaataaaaagcaggattcccaggaaccccgcgtctattcagattacccgctcacctcggcttctgcgctattacgatctgttttttcataggtacggaagttttgttcaagctgttcgagcgaaagacctttcgtttccggaaggaaccttttcacaaatataacggacgctatccctaacaggacaaaaatgaagaaggttgcagacaatccgatgtttgcgagcatgaccggaaaagttaaaccaacaatgaagttcacgatccagaggcagaagacagtcacccccataccaagcccccgcaatcgcagcgggaatatctccgacagcatcagccaggtcaccggagagacagccccctgctgaaacgcaaggaaagtgactgttaatgaaagaaccacataaggaagagcaggcgatcctttcagcacgacagacagaactccgatcaaaagcagcaccgcagtcgttccgatcagccccgtcatcagcatcgggcggcggccgactttgccgagaagccatattcccacaaaagtcgcgagcaccgaaatcacaccgttagcgatattgccgattaatgcggcttttgtctcaaaaccggcatcttttaaaatttgagttccataatacataattgaattcacgccggtgagctgctgcactaccgcaattccgatcccgataaacacaatgcggcgcacccacggaacggcaagatccttaaaggtcgcctgctccatctgagcttccttatgaaaggcagattcaatctcagcgagctcagacttcgctttctcttcattccttattcgccggagaacgtgcaaagcatcttcttttcttcctttagaaaccagccagcgcggactttcaggaactttcagcataccgaaaaacaagaataccgccggaagggccgcgataacgagcatataacgccaagcgtgagaggtatcaccaagcacattgccgatgatagcattacacgtgaaggcaagcagctggcccgttacaatcatcaattcattttgggtaaccattctccctcggctttccgccggcgacatttcagccaaatatgccggaacggttacggatgctcccccgacggcaagccccagcagaaaacgggagatgatcataaccgatacgttaggcgccagtgtacatccaagcgtcgctataaagaacaaaacggcaaggataaggatatttttacgtctgccgttatagtccgacaatctccctccgaaaaccgcgccgatcgcagcgcccaagagcagggagctcgccaccatcccttcagtcaaagcggtaagattaagctggtcagcttccgccataaacggcagcgccccattaatcacaccggtatcgtagccgaaaagaagccccccgaatgtcgatactaaaatgatggttctcaaaaatgaatgctggctgctatttttattcatcttcaaatcctcctagtttttacacagagataatatcggaatattcagttatcaatatttacacctctaacgtctgcatacaaggtctgaccgtccaaaacagttatataagaagaaaatgttccgaaagcgttatcatttatagtgattattcgctctccccctctcgtcatattgttattttatagttactttgtagtgaagttataatgatattattggtacttatgttaatatcataattttaaaagcgctttcagtcaataaatatttcagaaaattttataactcacctttatatcacctatatataatcaattttcgttttatatcaatttatttccataatatactcaattaattacccctattataatcaataattgattacatattgaaaacccccaactgctgattgggggtttttgttttattcttcgtttattgtaacaatcgttctccctctcgcttctccttttaaaagggcaggaagcgtatccggcagctcttcaagtgtaatttccttttgaataaaggcctccagatctgcaggcttgaagtcatcagctaaacgctgccatgttttctttcttgtctccatcggacagaatacggaatcaattcccaagagactgacgccgcgcaatataaacggaaagactgtagccgggagtttcgttcccgctgtcagtccgctcacagcaactgatccgccgtactgaatctgactgagaactgaagcaagcggctcacctccgaccggatcgacggccgctgcccatttttgtttttgcattggttttaacgtgccgttatacacttcgtcgcggtgaatgaccgtctttgctccgaggctcttcaaatacccgctttcttcttcttttcccgtactggcctcgacctcataacctaaggttgaaagaatggagacggcaaagcttccgacgccccctgtcgctcccgtcaccagcacctttcctttttcaggagcggcatggttttcttcaagacgctggacggacaatgcggcagtgaagccggcggttccgatcgtcatggcttctttaagtgtcagaccttcaggcagcggcacgatccaatctgccggaatgcgggccagcccgctatagccgccaaaatgggaaacgcctatgccgtagcttgtcgcaatgactttgtccccttctttaaaacgggcgtcatctgaagaaacgacgattcccgctaaatcaattcccggcacgaaaggatacgaggttacgatcttgccgtcaggaatggcagccaagctgtctttataattcacccctgagtagcaaaccttaatcagcacttcaccctcgggaaggtcctgaaccgccagctcccgtacgctgactgaaaaccggtcttcacgctgatcgactactaacgctttaaattgatctgtcatcactacgtctccttaaaatgaattgaatggctttggaaaagcataaaataagtttgatttgttttcaaatgtcctgccctgtgtagtatgatcaaaagtaaaaacagcgaaagagtggttacgcatcatgtctgataaacaaaacaaagataacaaaaacaacaacagcaatcagccattaccggacattattcataccgccgttttcaaggcgccgatacaagttgtctgggatacggtctctacggcggacggcctgtctctctggtttatgccgaatgatttcacgcctcaagaagacagtgagtttcagctggaatctccgttcggtccgtctccgtgcaagctgctggatattgaagcgccgtaccgcctttctttttcgtgggatacggaaggctggatcgtctcttttgtcttaaaggaaacggaaagcggagatacggaattcactctcattcacggcggatggaaagagccggaagccgtcatcaataaagtcaatcggaaaagctccgagattcacagtacgatggatcaaggatggaacgggcttgtcaacacgaaacttcgcggggcggttgaggcttaacacaaaaggacggacacgctttccgtcctttttttgatgccgatacataaaaactgactttgcaaagacactaacagaagaaccgaaaacttctttcagggggcgctgtttatgtattattacaaagaagagctgatcaatatcattaaaccggacaagccggacccggccgcggccaaggtgcttcaggaaattttaggcgggcattacggggaaatgcggacgatgatgcaatactttttccaaagctctaatttcagaggaaaagaaaagcagttccgcgacctgcttcgcggcgtatttttagaagaaattgcacacgttgagctcgtccagcatacgattaatgcgctgctggatgaaagcggcgctgagggcgccggaaatcaggcagcagatcaggcgccgctagacgaagcggttaaacacgccaatccgcaccattatattatcggggcgcaaagttctcttcctgccgatgcaagcggcaatccatggaacgggtcttgggtatacaaccacgggaatctgatttccgatctattggacaatgtcgtgctggaatcaaccggcgtgctgcaaaagacgcgcatttatgaaatgagctcaaaccagacgttcagagaaacactcggttttctgatcgtccgtgacaacgcccatcaaaatgcatttacaaaagcgctggaaacactgggtgtcgaatggggcaaattatttcccgtgccgaattatgatattgaaaaatacccggaatgccggaaattcgttgaaatgggttatcataatacccaatttaatttcagactggatccgacacggatcggagaaattctgcagggaacgacgccgagccgaaacggcggcgaattaagtgtgtcagagcctcctaaaggtttccccgtgccggaacttcccgagcttccgaatgagcacagccccggactgaaagatatgaacttgtaacaaaaaacgcctgtttcgggcgttttttgtttttctgaatatgaggtttgaatgtgttcaaaacggggaatataagccgggagatcttgccatacggccgtgattttgatgtgagcacatttctgtacatacttcgtttcgaaagttgtcctaattttccagccggccggctgggtatgtttgaatgataatgggaattatgtaaagagaacaatgtcttttttaaggaggcagcgaatgtctaagcaaggaaacttccagaaaactatgtcactttttgatcttattttaatcggcatgggagccatattcggttcggcatggctgtttgccgtcagtaacgtcgcctctaaagcgggcccgtcaggcgttttttcctggctgatcggcgggggaatcatcttattgatcggcttggtttatgcggaactgggcgccgcgctgccgcggaccgggggaattatccggtatcccgtatattcacacggacacctggtcggatatttaatttcctttgtcaccattgtggcatacacgagtcttatttctatagaagtaacggcggtccgccaatacgtggcgtattggtttcccggtttgaccgtaaaaggctctgattctccgacaattgccggatggatattgcaatttgcgctgctctgcctgttcttcctcctcaattactggagtgtcaaaacctttgcgaaagcaaacttcattatttcgatttttaaatatgtcgtaccgattacggtaattgttgtactgatttttcattttcacccgggcaatatgaccgttcacggattcgcgccttttggtttcaccggaattcaggccgcgatttccacaggcggcgtcatgtttgcataccttgggctgcatccgattgtggctgtcgcgagtgaagtgcagaatccgaagcggaacattccgattgcattgattgtttgtattatcgtttctactattatttataccgtgctgcagctcacttttatcggggcgatcccgggggataccctgaagcacggatggccggctatcgggactgaattctcccttccgttcaaagatatcgccgtcttgctcggtttggggtggctggcgacattggtcattttagatgcgattttatcaccgggcggtaacggaaatatctttatgaatacgacttcacgtctcgtctatgcctgggccagaaacggaacattattcagcattttttctaaagtcaataaagaaaccgggacaccgcgtgcctccctttggctttcgttcggtctggctgttttttggacgcttccgttcccttcttggaacgctcttgttaacgtatgctccgtcgcattgattctgtcttatgcgattgcgccgatttcttctgcggcgctgagagtcaacgcaaagaacattaacagaccgttttatttaaaagggatgagcatcatcgggccgctgtcgtttatttttacctcttatattgtatattggtccggatggcgcaccgtatcctggcttctcggttctcaaattgtcatgtttctgatctatctctgtttcagtaaatatgctcccaaagatgatgtcagcatacgccagcagctgaaatcagcatggtggatcgtcggcttttatgtcatgatgctgattttctcctatctcggctcgttcggccacggattgggcattatcagcaatccgcttgacctgattctgatcgccatcggttcgctcggtatttattactgggcaaaatatacaggtctgccgaaggctatgatcgacagtgataaatgacgaatgccggaaagaagtatggtcttctttccggtatttttatgttaagggatgacaaaaaagcgaacatgcgataaaatgaatgacagtcattcataaaaggaggaacccctctattggcaaaacaaagctcgggaaaatacgaaaagatcctgcaagccgcgattgaagtcatttctgaaaaaggattagacaaagcatccatttcagaaatcgtcaaaaaagccggaacggcccaaggtacgttttacttatatttttcttctaaaaacgcactgatatccgcgattgcagaaaacctgctcgacactacgctggacagaataaaagggaaaacggacggttctgaagatttttggacgttgctggacattttggtagatgagacatttcacatcacccggcttcataaagatattatcgttctctgttattccggtcttgccatcgatcattcaatggagaaatgggaagccatttatcagccttattattcctggctggaaggcatgatcaatacggccattgaacagggtgaggtcatcagcggcattcatgtcagatggacggccagaacgattatcaacgttgtcgagaacgcggctgaacggttttatatcggctgtgaacaggatgtcgatctcgaagtatataaaaaagaaatattcagctttctcaaaagaagcttgcagaaatgattggcggagaccgatcatttttgaccgccgtaaaaatgactgacattcattcataactgaggtgactgtatcatgtattggctgcttgtattgatagccggattgttagaagtagtttgggcgtccgccctgaagcatgcggattcgctctttgattggattggtattttccttttgattgccgtcagctttctgatgctgatccgctcttataaaaaaattccgatggctgccgcatataccgtttttgtcggaataggcaccgtcggcacatatgtaacgggcgtcattttaggcgaatcgttttcaatcggacaaatattctttttggctttgctgttgtccggcattttaggaatgaaggtatttacgaaagaaactgaaacaaggggtgaacattaatggcatggctgctgttatttattgccggagcggaggaagttgtagcggccgttgccatgaaacatattgacggttttaaaaaaaagtggccgctgattgtcatggtaacaggctttatgctttcattcttttgcctttccggagcgatgcaggttcttcccacaggtgtcgcgtatgcggcttggaccggcatgggaagcatcggcgtttcggccgtaggcatactttggtttaaagaaaaattcaatctgtcacaattggtgtctctggggcttatcctcatcggtgtcatcggcttaaaactgacagcgtaacggcctgagacagctttttaaataaaaaacaaaggaccctaaacgggtcctttgtttttttatgctgttttgatctgttccgcttttcccgctccgactccgaaaatgaaaatcagaacagagactgcgatcagcatgaataacggaaccgtccagccgtgcgtgatgtcatgcagcaaaccgaatacaagcggcccgaacgcggcaagcaggtatccgaatgactgggccatgccggaaagcgccgcggcttcatgaacatgccgggtccgcaggctgaagaacatcatcgccagactgaacgcacagcctcccgcaattccgatcaaaatgacccatagcggagtgagagccgggcttccgaaaagaacgccggcaatgccgataaggaaaaataaagccgtcagtccggcgagtgcgcgctgatttttcattttagcggcagcgatcggcacgataaaagtaatcggcaggactgagaattgcattaatgaaagcatccatcccgccttacttgagctgagtccattctgctgaagaatttccggcagccaagcgatgacggtgtaaaaaataagggattgcagccccatgaacatcgttaccttccaagccagcggagaccgcatcagactgttttttttctctccgtttgtcccagtcgtgcggacgggcagttcgcgtcctcgcatttgcggaatccacatgacgaacgcaataaaagaaaggatagcccagcagccgagcgcgcctttccagcctacccccgctgaagaggcgatcggcacgctgatgccggatgcaatcgcgccgcacagattcatagaaaccgagtagacgccggtcatgatgcctaaatttccgggaaacttatgtttaatgagactcggcagcaggacgttgcatacggcgatcgacaatcccaacaggatcgttccgaaaaagagagtgccgattccggcgatggagcgcagcagagttccggctgtcaggacaattaatgatgacagtaagacaatctcggtcccgaagcgccgggacaataaaggaacaaacggcgacagacatgcaaaggccaaaagcggcactgtcgtaatggtgccggcagccgcattggtcatgccgaggctgtcccgaattgaggaaacgagcggtccgaccgatgtcagaggcgctctgaggttggcccctatcaatatgactccgatgaccagcaatatcagttttttacgctgacttgcttgcagaacttgatgttcgtctttaattttcatgttcatcctccatgtgtattgtatctttaaatactgtgatgtattggttgacggcctccatggcctgatccggtttctgtccgataatcgcggcggcaagctgggtgtggatccggatagcaggggtgatttccaacaggttatggactgacgcacaaagcgcctccgtcatatgctcgtatagatcagaaagcatattgttatgggccgcctgtacaattgttttgtgcagcttaatgtcggcttcggcataccgttttcgatcttcattttgcaaggccgcttcacattcatccaagcatgccttcagtgctttcaggtcttcgtcattacgcctttccgccgccaatcgtgcagcttctctttcgagtgcgtatctgacttctaatgtttcaagcaaatttgattttttaatatggcggtaaaatgccgcgccgagaacactggatgagctgacatacgtaccgctcccctgccttgtctgcagcaggccggcatgtacgagcgcccgaatggcctcacgcaacgtgtttcggctcacatcaaattgcttcattaaatccagctcagggggaatgcgcgtcccgaccggccatttatccgattgaattaacgattcaatttgcgccaccacttgttctacgagcgacagtctgcttgttttggatatctccatcaaaacacctctgaaatttgtaggatgattctatcattgggtaatataacataaaagaagcgacgatgtaaatcagcggcaacaaaaaaagagtgagtttttctctcactcttcggcgcttttatgaacgttttatattgactgaggtcacgacaaacttgtcatgacggtggcgggaaaatgaatattcaaagggagtgccgttgtccaaaaagcctacatgctcgacttcaagtatcgggtcatccggccggcagccgagatattgctgatccatatcatccgacttgcacgctctgatttttctgtgtgtgcccgcgattttgagctgcaatccccgcgtaatatgatcgtagatggaatggttgagcacctcgtcattaatgccgggtataaggctcgccggcatgtacgttttttcaagaacgtacggttcgccttcaacgattctgagcctcactacataatagacgggagtcttttcatcgatagccaaatgtgcggcgacatcttgagacggaaactgcacttcaaaccggatgaccttgctcttgatatttttgccttttaacaaattgctcaagccgagaatttcgttgctgactacgtgaacgtgctcatcctgcatggctgattgaatgataaatgtgccgtgccctctttttctgaaaagcatcccttcagccgcaagtgtatcaagcgcccgcttcatcgtcatccggctgcacccgaactccgcagcgagcgtcttttcatccgggatcggctgatctatgtcatatacactgcttttaatcctctttctcatttcgttggcgattttttcgtacttattcatcggtttcctccggctgtgtaatgtttgatctgtatagactccttacggttatcataaatttttttccctgcttcatcaatgacgttacagccgccgatattgaaattgaaaggatttcctcgaattttctatggaatctccctcactattatggtagaattttttgcagaaacggacacaaccgaatattgcaatatattgtataacctcaatgatatggtttgagggtgtctaccaggaaccgtaaaatcctgattacaaaaattgtcccgtacactttttgtaatcaggattttttattttctaaaaaataaaaaaaggagtatctgtacatgaatttcaaagtatttctgcttgcagcatctaccatcgcagtcggattggttgaattaattgtgggcggtattcttccgcaaatcgcttccgacttagatatatccattgtcagcgcggggcagctgatcagcgtgtttgcgctcggttacgcggtatccggcccgctgcttttggcagtgacggcaaaggctgaacgaaagcggctttatttaatcgcactgtttattttcttcctaagtaatctggtcgcttatttcagtcccaatttcgccgttcttatggtgtcacgggtgctcgcttccatgagcacagggctgattgtcgtcctttctttaacgattgctcctaaaatcgtggcgcctgaatacagagcgcgggcgatcggcatcattttcatggggttcagctccgcaatcgctttaggcgtgcctgtcggcattatcatcagcaatgccttcggatggcgtgttctgttcttgggaatcggcgtattatctctcatttccatgctgattatcagcgtctttttcgaaaaaatacctgctgaaaaaatgattccgtttcgtgagcagatcaagacgatcgggaccgccaaaattgccagcgcacaccttgtcaccttgtttacattggcggggcattacacactctatgcctactttgcgccttttttggaaagaacgcttcatttgagttccgtttgggtcagtgtatgctactttttgttcggtctgtcagcggtatgcggcggcccgttcggaggctggctgtatgaccgtttaggagcatttaaaagcatcatgcttgtgaccgtttctttcgctctgatcctgtttattcttccgctgacaacggtttctttaatcattttcctgcctgcgatggtgatctggggattgctcagctggagccttgcgccggcgcagcaaagctatttaatcaaaattgcgcctgagtcttccgatattcagcaaagcttcaacacgtccgctttgcagatcggcatcgcgctcgggtcagccatcggcggcggcgtgatcggacaaaccggttctgtcacagcaacagcctggtgcggcggtttgattgtcattatcgctgtcgcgttagctgtattctctttaacgagacctgccttgaaaagaaaatccgcataaatgtgagaccgcaaaaaagccaaaggagttccttcggctttggcggtctttttattttgcggcagcaagctcgtcttctgtcacccatttatgattggttactttttggccgccgtcagtcggtgtatagtcgaccatataaacggttgtctttttggctgaatcaataacggcttcggcacccttcatgcctttcatatgggatgcctcgatcacggccttgtcacccggttttaacgttttatcaccggcgcccttcagctcttcctgaatgacccatttgtgatcttcgacgcgctttcctcccgtttccggagtgtaagatacactgtaaaccgttgtatcataagcaccttttacggttccttgcgcatttttcatgcctttcatatgagaagctaaaatcatgacgtcactgccgactttataagtcggattttcggctttctttaaacctttcggcacctcggatgaacctgagtgattcatgtcttcgtgagagtgcgtttctttgtctttcgctttttcgcttcctcctgaagattgaccgttgcatccggcaagcgccagaacggggatcaggagaaacatgctgaataaaaatagtctcgctttcatttcaagaactcctttgcctttttgatttttcattttccctttcgtttcttcggtaaaacaaaaagatggcctgtcatttctcctaattcttcaactctctctttattgccttttatcaggtgaaattgttcacaaaatgtacacattaatagagatgcagtataatttaattatcagataatagggggaactcatcatgaaaacgaaggtttttgcggtggtattgggcgctgttttaatgattgcggggttggttttggcagaagtttcgctttatatggaatacatcacaatggtcggagctatgattttttcttctatatttatgtcagagccgaaaagaaaatttcgcgtcattaaaggggtttgacttttctattaccgccgtcttctcaggacggcggttttgttttgcatgtcagtcagtctatccgcaaagccgtttcttctgtgccgtcctgatataaaacgaaatgcggggcagtttgtgctttatcacctgcaaattcaatttcaagcggcagcgccctgacaaaataacgggtttccgtcattgggaataattcaaatggtgtctgcccgtctattgcaagatacaatcggttttcttttaccgtcaccgatgcatgtgtgtcatcctgaaatgagtaattgccggtaaatctgctgtaaatcgcaggatcgatatctgcttttttctgatccgccggacgtttcggaatcacgtacggctgatcaaataagatgtttacggccgcggcaatcacagcttgttcaaattgatacgattgttccatattgctgagataaatcagtgttttgttctggtcaatataccggatcatcagagttgaataacccggccagcctccgtcgtgactgataaccttccctttttgggcgctgttttgaatcatccagccaaatccgtatccgaattgctcttcttcattccaatagcccggtgtaaacgcttgatctttagactctttgccgatgatttcttccttataaagagcctgatcaaacagatataaatctctaatagtggagttaacggttccgtcaccttgaatcccgtcaagaaagacgacataatcggtttcctcaagttcatccggcagcacatattctccggaatgaacatcatacacatagccatatgcatagtttggaatgttttctttactcagccttctgttataaatccgcgtatcgtgcatacgaagcggatgaaatacggcttgtttcataaattcagcaaaactcatgcctgatacaatttctataataaccgctaacaccgcataccccgtattactgtatagccactccttgcccggcgggaaataagcatccggtttatgctgcttaagcatatcgatcacatcttgattaacggcaattctgtcccggtcccaatgtgttaaaaataactccatatagtccggcaatcctgacgtatgatggagtaaatgccgaatggtaatgcccggataaggaaaatcaggaagccaccgctctatcatatcgtcataacgcagcttccctcgctgctctaaaatgataacgcctaaagctgtaaacggcttcgatactgaggccaattcaaagactgattggtcattcagcatcctctttgttttcagttctgcagcgccgaatgaaccctgatataagatgcggccgttttccgctgccaatacagctccgtttatttcatgtctttcgtctaaagtgctgaaaagctgttcaaaagcttgttttttcttatcgttcatttcacgaacctccatatacaagctgatttactcttttatacgaacagccgctttagaagtttcaatattttcccttcccggaacaccagtcagtaaactgccgttcaggcagccgcggaggtttaatgaaggtcttttattcgcacaacactgtgcaggcttcgaactcaacatgcttctcgtctttttttgcgccggcaatttccatagtcgaaaacatcgcacagatgacggctttgtattcgttcatgacggtttgaatttcaatcagaaaccgttcggatgaagaggcgtattccgttacgtattctttcattttgccgataatatcatctgcctgacggatgaagccggccgcctccaagtcactctcaaactggtttttgttgatcatatgaatatgcatttttcaaggcccctttcagcagcgttttatggttatatccactgtaaaggacaggcttggataaacttttaataaaatatgaacaaaatatgaattggctcatcggcctgaccggcgggctttcggctgtgctccgtttcatttggactacctgaaataatgacttctttactctatgaaaaacagctcatatatgatctaataccagtaaaatgaacgttaggaggcggcctatgtcagcagcaggaaatcggcaaaaattttgggtcatggcgatgcttatagcggtctttgccgtgtttgttttctctttttccgagaatcattcacaaaagaactggcacacggcggttgaccaggcgtcagtgaatgtcttcggccagcagatctttgaaaaagaccgtctggcaaaaacactcaacgcacgtgaggcagaatctcttctgactcttgtgaaacttgcaaatgaagaacatcacatcatctaaaagccattataaaaagcctgtttccctttggcagaggaaacaggctttttccatgtattattgagcatgtttttgttcaataaaccggtcgatccgggccagaacatcctgcatgtccatacattctttaaagctttcattaatggcttgaatgccttgtttgtattttccgttatgcagcacttcttccgcggcaagctttaccttttcagcgctcacttcatctttttgcactgtacagcctgcatccaattcagtcaggcggcgcgcaaccatcggctggtctttatcatgcggaataacgaccagcggcacttgataatgaatgccttcatttacactgttcattccgccatgcgtgacaaacacgtcggcctgctccagcacttcaagctgcggcacgtacggggcgatgataaagttttccggcgcctgtttgattttcgacagatcggctttttccccggcggcaatgactacttttccttcaaaatctgagaacgcgtctatgcacagattgaaaaacgcttccgtgtccccgagcaccgttcccattgagatataaatgactttttcattctttaatgagtcaatcgggaagtcgacgcgcccttttctcttcggaaaactcggaccgataaataaatactcatctccgaatgtctcactttcgggctgaaaatatctgcttgtatagacgacgttcaattcacctgtgttgttcataaattgaaccatgctgtcaggggcgacaccgtatttgtctttcatctcggccaacagctcttcacattccctgtccggctgaaacggcacgcccgattccggatggagcggcagtattttcagacggtcttcattgaacaggaaggatgctgaagaagagatgccgggaatgttgagataatcccgcaccaactctcccgcaccaaatttatcataatagacggcgtcgaattgaatgtcctctgccagccgctgcacaatatgtaaaatctccagtgacgttttgatatgaacctttaaaaatgcaagtatgccggacggactgccgggatcaatgggtgtcattctgagcagatcgctgtgaagatgaactttcgctcctactccttccagtctgcttttgtatttttccgttgagatataatgaacgtgatcgccccgttcgctgaaggcctttgtcatacccaaagtcgggtttacgtgtccttctgcgggaaaattgatcatcagaatatgtttcgccatttttcaaactcctttgccttttttgcgtctcttccatatccatcataaatgacgcggaaaaaatcatgcaaggaacattcgtcaggtctttatgacggttcgatgacatcggcaaaaaaagacaaggcttttcaccttgtctatcgtgatgattcgtctgtttcacccgctttgagcacacctttcagatgttcttcatcatgcttgagatgctccgtcatatattgcacggcttttgttttatcgcccttttttatttcttcaaagactttccggtgctcatgcaggataacctccgcacggtcatctcctttaaaattaagaactctgcaaaaatgaatcagcacattgacatgctcaagcagcatggccagccggctgttgcggctgaaatccacaaggagccgatgaaacgactcgtttaaggaaataatctcagtctctttgacgcctttattgatggcttcttccgtctcccgcagctgtttttcaatgaggtcaatttcactctcagccgcttcatcaataaccagttcgaccgccaatgattcaagtgacattctgatttgataaatctcttcaacatccttaacggacaaagaataaatgacaaagccgtttcgatcgtctgccgtcagaagcccgtccttttcaaggagccgcatggcttctctgaccggcgaccggctgactccgaaatccttcgccagctgagtctcattcagccgttcacccggtttaaaaatcccgtcaaatatcatttttttcaattgggaataaaactgcagataatacgggattggcttatctaatttaaaattatccatctttcctacctcttcatacaatttaggccttattgttaccaagatcatataacagtttatctatggaagcaacattccagagcttgtcagcataacggaggtgccgtaatatggaagtatagttggtcgagggtattccgtaaaccgaaaacaattcattcggaggtgacggaaacatgaagacatactagattgccggcataccgggggacggtgtggggaaagaagtcgttccgcaagcggagcgggtgttgaacgcgatcgccgaattacatggaggcattgcctttgatttcacttcttttccgcggagctgcgagtattatttggagcacgggactatgatgccggatgatggattagaaacgttacagcactttgatgctttgtttttgggagcggtggggaatcaaaaactcgtccccgatcatgtttcgctgtgggggctgcccatcaagatacgccggtaactacatctccgattttgatctgtaaacgtccgggaaggtgagtacagctctgtcggcagcagcatctatcagggtgaagatgaaatcgccattcaatacgcggtcctttcccggcggggtacggaatgagtgatctgttttcgaaccggcagcgttcggctggggttttgacaaagaaatgatacaattttttacagagatagagagagaaaattgtatgtcaaatcgcagcaggggaactgcaaggaaacggtaacccctcctttaattgtggtgaaaaaagaggatacacctacaagacaggtcgattaagatggtctattggcatcttacatccgcaaatatgtctttacacaaaaaagttagagaggtaaaaaatatgaaaaaaatattttacttttttttgatattatatataattatagtattattacttaattctgtatttgacttaagtaatgtattattaactgttttgtttgctatattcgttggtgcattagtgatttatagcattgcgaaacggagtaaaggtgatgagagaaaaaagtgttaaagaaggttactaaattatttatagcggggtgtattctcgctactgtgttgtctgctttcgctccaagttctgaagcagcttgtcgacggacaaatcttgggactcagtgtgataatgatgttcttcttaaaaaaagggtaaaggtttattacacaaaaaatcaggtgaaaaaagtggtttctagatataacagcatggggtctaataaagggcttattctcggttatattattgggttggtacacccttctactggtttaagtgttttaatgtatcaagtaggagctaataatatgattaagccttttaaaactgctaattctaagaaaaagggtttagagatttcttacacggttaccgtttataagtggtcaaatgcatctactaaggtatctggagtaaaatataaatatagataagactaagtaatacataatgagcaggcgatggcctgcttttttttattacaggagaaatgtgcaaaatgaaaaaggaaaactgaagtggaaatcgatctgcatgtcagggagcctgtgtgatgatgcgttcccagagtgagtcaacagtatgcggattgcagggaggattaaggagttgactcactcagtcagcattcaaacaaacttgtttcaatcggcggaaacacgtcacaagcgcgacgaaatcaaacggtattgttcactcgatgccgttctgggatgacatctttaaagaggtcagccgggagtacgccgggatcgagacggattcccagcacatcgatgcactggcggccttctttgtcacgcagcccgaacgctttgatgtcattgtcgcttcgaatctgttcggagatgtgctgacagatatcggcgcggcgattatgggaagcgtcggaatcgctcccgcagccaacatcaatgtaaacggcaaatatccttccatgtttgagcctgttcacggctccgccccggatattgtcggaaaaggaatagccaatcctatcggccaaatatggacggcgaaattaatgctcgattcattcggagaagaggaactgggccatctcctcttacaatctattgaaacggtcacaaacagcggtattctgactcctgatgccggcggaaaacattcaacggaagatgtcacttccgctattatttctcaaatcaagaacagataatacgaaaaaaccgcgggcaggaaaactgcacagcggttttttcgtctcagacgggacggagcgcgcagaaacaggccgattcacctgtgaagcccgcaatacggcctgattgatccttttctacagaaaaaaaccgctgtatatcacaaggagcatccagcatctgtttttccagtaatgcggctttctcttcagtcaggcttgcccgttcacaccagacggtaaattgaaatggtttcaaaaagcagacagcggattcaatccggaagccggctgtctccagaaaacgaagccattctgtttttttccacgcccgaaagtggctctgatcccgtttcttttcaatgtcattataaaaatggtcatattcatccttttcaggtgcggtattgtcaatgagaagcagtctgccgcccggtttgacaacccgaaacgcttcatgaacaaaggctctgacatcgggaaaatgatgcgccgcgattctgcatgtgacgatatcgaaagcagcatcggaaaacggcatcttttcagcatcgcctttttcgaatgacacgttcgtccatccgtttccggttataaatgcttcagcggctgctaacatttcttccgtgaggtcatatgcgataacagagcgtacgagaggagcgagagcgttagccgtatgtccgcctcccgtcgcgatatccagcacgtccatatgcttttcggcaccggaagctgaaatgagatatgccaaatcctctcctgcggcgtatccgggactagtcacatatttcgcggcgtttttagcaaattgccgctgcgcctgctgtttaattgaatcctccattatacttgggcccccttttctttctgcttgctgccttaatcaaaataaacgggttcgtccggatgtttgagatatgcaaacatcttttcaatctgactttccgtattgcgggcttcagatagcggcggcagttccgtttccgcaaaaaagccggccgcgcttgtttccgttccctccctgagccggccgccgatgatctcgcatcggataaacactttgtaaacgtgggcggcggacggcgggtgggaatggcatttcttatccattacagctaacagtttaacgggctttacgtcgattcccgactcctcttttacttctttgacagcggtctcgcccggtgaaatcccgatatcagcccatccgcccggcagcgcccatctgccgtcgcttttctctcttaccattaatatgctctgatctttaaaaactgccgctctgatatcaactttcggagtgggatagcccgtgtcaccggcgaatacgtctttgatgatgcttttgtcgatgccggtatgttgcgccatgatatccacgcttatttttcttatttcttcaaatctctcaatatcatatatgtctttggaataagccagccccgcttgcgccgcggattgaagctgttttgcccattcaagccattttggctccattttttccaccgcccgttatgttaattaaacgaaacccgaattgcaccttgagagtaccccgtttctgctccttgttttctgtttatggcggagcgaatcctgccgggaaatcagaaaaagccattcatttgctgaatggctttttttcattttctatttttctttcatgacgagaacgacgcctgaaacaataagggccgccccgatccagaaggttcctccgatcgtctctcccagcagcagccagccgagcaatgtcccggaaagcggctgaaagaagaaaaacagaccgccgcttgccgcattcagcaattgtaatccgcgattccaaagcatgaacgcgcaggcggttgagatcacacccagatataaaagtccgccccatatctcaggccgggcaagctgagacaaaggaatctcccgaagcgggccctctgtaaacggggtcaggatgacaaatgcgacgcaaatggaatacgttgtgacgacaagcggtgagtaatggccgggaacccgtttcatcagcacggacatcaaagcccatgtcagcgccccagccagaagcgagagaccgccgaactggctcgacatattgagatctccgttccccacaatgagcaatactccgatcgtcgccagccctgtcgatattccttttttcagcgttaaccgttctttcaaaatcagccgggcaaatacaaccataaatgcgggagtggatgccgtaataatcgcacccatctgcgcggttgataatttcgtgccgatttcctgcgtgacgatcgaaatcgtgttgccgatcaatccgatcgcagcgatcagtaataaatcacgtttatgaactttccaggattggcgtgtaaataaactgagaatcaaaagcgaaaaaagcgccaccgcatatctcagccataccagttcaagcggcggaatgaccgctaccactactttaacgacgacatacataccgccccagatactggcggccaatgccaaataaatcgaaccgaacaatgtatttttcaatttgatgcaccctccgttatcatattaggtcacgtcatatgccttaacggagagaagcgcagtcactttcctccattaagggcggagaagtgctgccggtacatcatgttcaaataagggcgctagaaacatatcgtttttcacctcaattgcaatctgatttttctcattatacaaggtttgtcagaagacgtaaacgaacggcggcatcggctttatcgattgcggacttgcagctggattcttgtgatctgattgtcaaacccgtccgccacaacctcatcaagcaaatattcttcatatgcataatcgcccatttccagcccatactcttcaataaactgcatgatgctgcggtaagccgcttccgcttcatcccctatttggtacccgacggcataaagccctttcggcttgatatggaggtcattattctctatgccttcttctgtcttcatataaaaatgggtgtagttgtagaattcttttttcagaatctgctcccgcgcaaacagtccgccgaccggatgcccctgatcgagttcatgtacccgcatatagcggatcaattcggaaatggccgcagtgtattgccgttctggcaaatggagtacgggtcgtcctatcataagtgtctcttcatctaatcgctgcaatgagacggaggagaagtctgtctccaaagcttgttcggtcagcttcacctttgtctgaatcattctttgcaggtgctccagctttttgattttgctttcgatttctgatgatttctcttttaaaagcgtgatgataccctcaggggttttgtctgttaagagcggtttgatctgcttcaagggcacgccgacctccttaaacagaccgataacctggaacagttcgaattgatgataggaatagtatctgtatccgttcgcttttttgatttccggagaaagcaggccgatttcgtcataatggaacagggtttgtttttttacgtggcacagttttgcaaattcacccgttgtgaagtattttctgacgtcttcgctcataatgcctccttgactatacggtaaccatatcctttatgatgatcattgtatccgagagaaggctgattcacaaatggcttacgcaatgaaagctttaccgtctcagaaaaagcagaagaggagtatcaagtatgacgattgaaatcagagcagtcacggaagaaaaccgtgctgatatactggcgcttcatgtaagggaaagccagacttcatttattgaaaccgcggaagagtgcttacaagatgctgaggattgccggcattatcagccggccggtctttatgttaacggggaattagtcggctttgccatgtacggatggtttccggaatatgatgaggaaaatgaaaacggcagagtgtggcttgaccgtttttttattgatgaacgttatcagggacgtggattgggcaggctgttgcttgatgcccttatccgccatctcgttcgaatatatgagtgcagacggatttatttaagtctgtttgaagataacgtgcacgcattgcggctttatcaaaaattcggcttcttattcaatggagagctggactcaaacggggaaaaagtgatggtgaaagagctgtaaaccctctgtataaaagcgattcggcttcttgccaatccctcaaatttgaggtaacataaagataatggacgacggtcgacggacgacgatcgattgttaaaaacctgataaagcggatctgaacatggtgatcaggcatctaaatggaggagaagattgtgcttattatactcgttatgttccttctcgggattattctagggtttatcggcgcggggggagccggttttgtcattgcacttttaactatactgtttcacgtaccgattcatacggctttgggcacctccctcgccggaatggctttcacaagtttatcgggggctttcagccactaccgtgaaggcaatattcagatgaaaatcggcctcatcgtcggcgtttttgcggcattcggttcgtttttcggggcaaggcttacttcccttatccctgcagatttgctgcattacttgacggcgggcatgctgtttttatccgctctgcttattttagtccggttatttattgtaaaagaaacacatgaagattccggacggcaaagcaatctgaacatatgggtgaaagccgttgtactcggtatcatcgcaggaatcttgtccggaacgttcgggatcggctctgcccctttcatccagatcggcttaatgattcttttgcgcttatccatccgccagtcggtcggcaccaccatgcttgtcattatcccgcttgcggtcggcggaggactcggttatgtgacggaaggatttgtcgattatatactgttggtcaaagtgctgatcggcacgatgtgcggcgcatatgtcggagcgaaattcaccaaccacgtgccgaaagtcattctgaaatcagccatctttttaacaccggccatcgccggtctcatgcttttattttaaactgaaacgggaggcggccgcctcccgttttttctgttcttcacctgttttcgaagagctttttcagctttgcttccgtttcggtatgatctaccggcgtatacacactgcagcgcagatcactgttgccctgaacctgaaatgaagtcaggttaaagaccatttttcccgccttcgcgtggcggaactcaattaatacttcgggtgccgagctgacttcgctctcattccacagcgtatgaaattccgaatacgttttctccatttcttctataaactgagaataccacgtatcagctacatactggccgtagtacgttctgaaaatggcgatgaatcctttcacaaagtgctcccagttcacagctaaacttcttaattcttttctggaaaacaatagctctatgagattccgtttttcaggaggaatttgttcaaaatctaaaaacacgtgagccgcggcctgattccatcccacgatatgacagcgcctgtccgagataatggtgggacaataacggagctcctgcaggatttttgaaagcgacgggctgataaccgcttcttcctccgcggcaaacggctgcttcacgccctcctcaatggcaagcgcgtataaataatttctctcatctttgttgagctgcagcgcatcggaaaccgcgtccaatacggctgcggacactttaatgtctctgccctgctccagccacgtataccacgtggtgcttacgcctgctaattgcgcgacctcttctcttcggagcccgggcgttcttctccgtgtgcccatcggcagcccggccatctgcggagaaattttggcccgctgcgtttttaaaaactctgagagcgcctgcaatcttccttctggtatcataccgaatctctcctctcttaccctggtattcattatactaggataatcaacaacttgtaataggataattgcgagttacaataaatacataccgaaggaggaatgaccatgaaaagagttgtgatcaccggaatgggagtgatttcacctctcggcaatgatgtgcatacattttggaaacacctgacggaaggaacatcgggaatttctctcatcgattcgtttgatgtctccggctccaagacaaaaatagccggcaccgtccgtgattttgacgcagaagaaagatggggcagaaaagaagcgagacggcttgaccgtttcagccagtttgctttagcggcagcggaacaggcgcttgaaagctccgggattcagctcgatcagattgaccgtgaacgcctcggcgtgtacgtcggctcgggaatcggcggcatcacgactttgattgataacgttcatactttaaatgaacggggagcgcgaaaagtgagcccgagccttgtccccatgatgatctcaaacgcggccgccgctcaaatcagcatcagattaggcgcgctcggcccctcactttctcccgtcaccgcgtgttccatcggcaatacgtcgatcggggaagcattcaacgccattcggaatgatgacgcagatattatgtttgccgggggagcggaagcggcgattacgaatttgtcattagccagcttcggcaatgcccacgcgctgtcagcgagaaacgaagaccccgccgcggcaagccggccgtttgacgctgatcgcgatgggtttgtcatgagtgaaggcgcgggcatcttagtattggaatcattggatagcgcaatcggcagaaacgccccgatcctctgtgaggtgctcggctacggcgcaagctctgacgcgtatcatatggtggcctcccatccggaagggacgggcgcatacctggcgatgaaaaatgctttgaaaaaggcgaacgtttcagcggaagacattgatgtcgtaagcgcccacgcgacaagcacaaaagccggagatctttctgaaacattggcaatcaaaacattattcggggagcttgcgtatgacattccggttacggccaacaaatcaatgctcggccacatgcttggcgcggcaggcggcgttgaagccatcgctctgacagaaagcctgagacacggcatcatcccgccgacgatcaatctgcagcaccctgattcggcatgtgatttggactatgtgtcagacgggccccgccatcaatcgttaacgatcggcctttccaactcattcggctttggcggacataattcggcgatcgtgctgaagaaatatgaatagcgggcatcaaaaaaaggagtgaatcatttcactccttttttgctttctccggttttgttgttaaggcaaaaaaagcgatggaaccgataacggatgtcgtgaacataattgcccccatcggcacggccgtcgcttcattcatccccacaagcggcgacacgatggaaccgagaagaagcggaagcatgccgagcagtgcgcttgcgcttcccgcgcggtgtccctgcttttccatcgccaatgtaaaggtgcttgtcagcgtcatgccgatcgtaatcatataaataaaaatggaaatcaccagtgccgccagcggtccgtgaatgatcgtcatgacgagcagaacggcagtcgccgtcatcgctgtaatcacgccgattttcagcaggcttttttcgtgaatgatcccgccgaaacggccgatgataaagcttccggtaatgatcgccagaccgtttatgccgaataaaacactgaatacctgaggcgatactccgtaaatatcctgatacacgaaaggcgttccggagacatacgcaaagctcccgccgtgaataaaaccgaccgtcagcgcatagccgataaatgaccgatccttcagcaggcttcccattgtccgcacggaatttccgatggagctcggaatccgcttttccggcggcagggtttctgtcagcttgagcgcaatgatgagaacaagcaaaaacccgataaaggttaaaaacagaaaaatcgtatgccatgatgcaaacggaagcaataaaatcgcgcctcccgtcatcggcgccaccatcggcgcgacggcggtaatgaccatcagcagcgagaaaaatttagaaagttctcttcccgtaaacacatctctgacgattgcacgggataaaacgagtcccgccgaagcggtgaatccttgaagaaaacgggcaatcaccagtgttgaaatgttcggtgcaagcgcgcaaaacagagaaaacaaagcaaataaaaaaatacatagcaataacggttttcttcttcccttcgcgtcacttaacgggccgacaacaacctgtccgattgtcagtccgatcagacaagcggttaaactgagctggacaagcgaagcgcgggcgcttaaatcttcggcgatttcagggaaactcggcagatacatatctatattgagcggccccagtatcgcaagcattccgagaagaaaagccagcgcaagccgctccttaccggtcggattatgcagcatatcgttcccacctttcctttgtcaatctctcaaaacatttgtatattgtatcataattttttctttatttttaaaagttttcaaagggcataaaaaaaaccaagggctgtaacagcccttggttccgggtcacgcggtaaaaggttttacgcgtgtttttctttaaatgcttttgcgtattgatcagccgctataatggcgtccgccacgtcgtcagccgtcacgtcaaaagcggcatgaatcgtttcttcttcaatcgtcgcggcttctgccactttcataatgtcctctttagatgcgtctttcattttgatgtcttcaagtgtgacaggcagccccaagctgatataaaacgcgatataccgctcaatttcctcaagcgaacgtttttccagcgccaattgaacgagcgtgccgaatgccactttttcaccatgggtcaagtgatggatttcaccttcaagcgcggtaaatccgttatgaatggcatgtgccgcagctaagccgccgctttcaaatcccagtccgctcagaagtgtattggcttcaaccaccgcttccaatgcgggcgtaacggctttcgctttcacagactcataagcgagacggccgtatttgaataataccgcttcacatttttccgcgatagcctctccggcgattgtcggaattccgcctgccatcgttttaccgccattggcgatgacactgcgcgcctctatccacgtcgccatcgcatcggcaatccctgatgctaaaaagcgcggcggagcttccgcgacgattttcgtatcgaccagaaccaagtcaggattcttatgataaaaacgatagttttcgaacgcgccttgttcagaatacacgacagacagcccgcttgtcggagcatccgttgaagcggccgtcggcacgataacggtgtagccgtttatttcatctgatacggctttggccgtatcaagcgttttaccgccgccgactccgatgacaatagtcgcccctgctttttctgcgatgccggcaattcttttcatttcttcctgggaggcttcgccgttgaaaaccgcctcttcagaagagatattgcttttctttaattcagccgtcaccttgtggcccgcgatatcccatacggttttgtccgcgatgacgacggctttttcaccaacgccctccagatgtccgccgatcgtttcaatggcgttttttccctgcacgtatttggccggactgataaaaattcgttccaatgtcatcatcccttcttcgttgtctctcattacatttctcttattgatagagcggaaatgaaaactcttctgatataattcctcgttttaacttggtttaaacctcatatacactgcagaaaatcaattttcacggcattgacaagatgtgaaggtgtctatataatcttcgatattgaagctgatcattctttactgaatgaacaaacgagattgtgaatgattcgtcttaaaaattatttagttctgctggataatttttgaggcgtttttgttttatatatatttttgactgcggaggaggtttgcacatgaagaacatttgcaaggatatactgatgattatggccggagcctttcttatcgcggcgtccgtggaatttttcgtcatcccgaatcatttaggggacggcagcaccgtgggaatcgctctcgttttatattatcttttccatatacctgcaagtattacgactctggttgtaaatttgatttttatcgggctggcttataaatttttaacgaaaaaaacgattttatacacgatactcggtacgggaatgacttctgtttttctcagcatcgtcagctttattccgttcggcgtgcacgacatggtgctcgggattgtattcggcgctctgctgatgggagcggggctggcattgatctttatcgctgacggatctaccggcgggaccacgcttttggcgtatttattgaattacacaaagggctttaacatctccaaaagcatgttttatatggattgtgtcatcattttcgcatccgttttagcgatcggaatcaatcatatgctgtatacgtttatattcgtttatctgtgcgccaaaatcgtcgatattgtcattgagggtttccataataaaaaagccctcaccattatgtctgaccaatacgaagaaatcgccaaagccatcacctccgagtacggcaacgcggcgacgattttttacggatacgggtattacggcagcaaagacaagcgcattatctatgttgtcattaaaaagaacgaattgctgaaaatcaaaaaacatgttcaaaaaattgatccgaaatcatttatcgttattcatgaagtaaaagaagctgtcggagggcaattcgggtttacaaacctgcccgccgccgcaaatgaaaaataaccgcctgcagtgtatagctgcaggctttttttattcggctcttccccgctcaaaggttttttacatctttcaatcgaagtagtaaatgaaaccttttttgatggaggaacataaaaaaatgaatatcaaaactgaaaggctcgtcattcggacatttgaaccggaagattggcaggatgtctatgcgtacacctcgaatccgagtgtcatgaaatatataccagagggtgtctttaccgaagaagatgccaggaaattcgttactgaaaacagcggtgaacatgccgggaagtttcccgttttattgaaggatgagaaaacggtcattggccacattgttttttttcagtattttggcgatcatacgtatgaaatcggctgggtgtttcacccggaataccagggcaaaggatatgcttcagaggcggcgcgcgccgtgctggcattcgggtttaacaagatgaaattacaccggatcattgcgacatgtcagccggaaaacatggcttcgcaccgggtgatggaaaagatcgggatgaggcgggaaggcttgtttaaaaaatgcatcccccatgataatgaatggtgggatgaatattattatgccgttttagaagaagagtgggaagcctccgatctggaataaaaaggcttataccctttgcttttacagataagtgtgtgctacactgttcgtaacaaatacgaagggatgatgggtggacaatgattaactaatcttattttgaccgtttgaaatcaaatatttcaaatcagaaaaaataggattagtctgcccattttctatacgatacgagaaagctatgtaaaaatagcttatttgatcacgcacaggtacggctaatccttccaaatcaattgggaggattttttgtcctccctttaaagcgagggattgacatatgaaagaaatgttaaaaataagcggcatcagttacgaaatcaacagcgttcccctttttgaacagatcagcgcgagtgttcagcaaggcgacatcatcggtgttatcggtaaaaacggcgccggcaaatctttattgctgcaattgatctgcaataaaaaagcgccgtcacaaggacagatccagatgatgcaagatgtgaacatatatatggtggaacaagaaacggaagcttatgattccggccatccggagcctgcggaggcagccttgttagaaaagtggaacgtgcccgcacgcgccttttcgcaattaagcggcggagaaaaattgaaagcccgtcttgccaaaggtttctcctcctcaagcggccttttgttattagatgagccgacgaaccacctcgatcagcacagtttagaaatactgcttaatcagatcaagaattacaaaggcaccattattttcgtttcacatgatcgtgcttttatagatgcggcggcgacaaaaatctgggccatcgaaggaaagaaactcattgaacataaagggaattattcaagctatatggaggtccgcaaacagagaaggctgacacagcagcgggaatatgagaatcagcagcatatgatcagacggattgaagctcaaatgaacgagctgagcgcctggtcaaaaaaagcccacgcccaatcaacgaaaatagaaggctttaaagaatatcaccgcgtaaaagcaaaacgcacggacgcccagattaaatcaaagcagaagcgtcttgaaaaagagcttgaaaaagcgaaagcagaaccggttgaagcggagtatgaagtccgtttttccattgagcaccgcaaaaaagcgggaaagcgttttttagaagtaagtgatgtcacaaagtcatatgaaggccgaacgctttttaaaaacgtgaatttcactgtgatgcacggtgaaaagatcgcgattacaggcccgaacggcagcgggaaaacaacattattgaaggtcatcctcggtcaggaaaaagcgcagggcggcatatggatttctccgtctgcaaacgtcggctatttaacccaggaagtattcgaccttccgcttgataaaacccccgaacagcttttttacaaagaaacgttcgaagcaaggggaaatgttcaatccctcatgaagcatttaggatttaccgcagcgcaatggacggaacccatcggcaagatgagcatgggagagcgggtcaaatgcaagctgatggcgtttattctgggggagaaagatgtgctgattctggatgagccgacaaaccaccttgatctgccgtcacgcgagcagcttgaagacactttggcccgatacgacggaacgctcatcatcgtatcgcatgatcgttactttgtcgaaaagacgacggacatccggcttgatatctcaaacggcagcgtccgaaaacaatggaaagaatctccctccgtcagggatgatgctgaagaactgcgattaaagtttgaaaccgaacggcaggaagtcctcggaaaactcagcttcatgactccggctgataaacaatatcgtgagcttgatcaaaagttcaaagagctgacggaagaaatcaagaagttgaaatgaatgtaaaaacccgtgattgtcacgggttttgttttggaaagttcacgtattatgaagaataatttcaaactgatttgtacaacctacgttcagattcatacgagaaggttcagaaagaaaggttcaggtgaacgcagaatggccaaacgcatcggaattacgggaaacattatggctgatcaatccggccctttcccgggttataatcgggcatatgtcaataatgattatattcagtctgtttctgaggccggcggtgtgccgtttatattgccggtgattcaagagacggcgcttttaaaggaacaggtctctcatgttgacggcatcattctgtccggcggccaggatatagacccgctgttttacggcgaagaacctttacaggctttaagaaagacctttcctgatcgggacgcctacgaaaaggagctgattctcacggcggttgctttagaaaagccgatactggccatctgccgggggatgcatatgttaaacgttacttacgggggaactttatatcaagacctggcacacgcttcgtttgctgacattaagcatgaccaagaaaaagatccgccgttaaaaacccatcatgtttcttttgaaaaagggacacgtctccataccttgtttggcgattcagcgcgggtgaattcattccatcaccagatcataaaagagacggcgccttcatttaaagccgcggcttatgcgaaagacggggccattgaagcgattgaacgaacgggtgaattatttgtcgtcggcgtgcaatggcatcccgaaatgctgacaaaaaaacatgaagacatgaaaaagcttttttctctgttcatgaatgcggtcagcacataaaaaaagcagatcataacgatctgctttttcattttattcttccggtttctccggtgttttgccttgtgtcagcttatggccttcgatatccacgttcggaatgattttatccagccacttcggcaagtaccaggccgcatgtcccatcagcttcatgacactcggaatgatggtcattcttacaatgaacgcatcgaaaagaacaccgaaggtcattgccaaccccatggatttgatcgtagagtcccccgcgaagatgaatcccgcaaagacgaaaatcatgatcagtcccgccgctgttacgacaggtccgctatgtttcaatccggcatggatggcttgtaccggattttttgttttgacatattcttctctcattctgctgacaaggaatacttgatagtccatcgccagcccgaaaagaataccgatggctaaaataggcaggaaggcgagaatcggacctttttccggaatgctgagcaagccggtgaaattcccatcctgcagaacgaataccgataacccgagtgtagcggtcatcgtcagcaaaaagccgacgacggcggcaagcggcacgagaagcgagcggaaaacaacggtcagcaatacaaacgcaaacccgacaataagaatggcgaatttcggaatcgcatcgtttaaccggtctgaaatatcaatattcaccgctgttgacccggtgacgagcaggcggatgccgtttttgtctgatcgtttccgtatatcctgcactaactctttcgttgccttatcattcggcccggtttcaggcactgccgtaatgatggcataatcccctttttgattcggcatggcaggtgtgacgctcgccacattgtgcaagtcctttatttctttcacggcgtcttgaaatgcttcacttttattccccttgactccttttgcatcggcaacaattgtcagcttgccgttaaagccttcgccgaatcctttagacaacagatcataggcgcggcggtccgggctgtctttcgctttcattcccgcatcaggcagccccagttctaaatgcatggccggcagactgatgacagctaaaagaataatgctgaaaatgcttaacagaataggcttctttgtaacgaagcgtccccaggcattcgtgtcggcgctttccttttctttcttcttgtttgatttcggaatcatccgttttcctgcgattgacaacaccgcaggaaccagcgttactgatgccaatacagccatcagcacactgagtgccgcagtcaatcccatcgcagacatgaacggaatgccgacaacggtcaatccgcaaagcgcgacgatcacggtcagtcccgcaaaaacgacggcgctgccagccgttcccgcagctttagcgatcgattcatttttttgtacaccttcgcccaaaaactgacgatgcttcgtaaagataaacagcgcataatcaatcccgacggccaggccgatcattcctgataatgagagactgaccgaggctatcgtaaagatctgtgtcccaattaacgtcagcgcgacgcttacacctaacccgatcagggccgtgacaatcggcagccccgctatgactaatgaaccaaacgtaatggccagaacgacgaaagccagcacaacgccgacaatttcagatacaccgccggcttcaacaccggcccccggcacatcgccgctgagctccgtctgcaggcccttgtctccggcggcggacagactgtgtttaatatgtgaaacagacgcatccgtaatgtcatccgccgcttttttgtacgtaatatcggcatatgccactgacccgtctttagaaatggttcctgtttcaaaaggatttgcaatcgaagcgaccgaatgatctgttttgatcttctttaatgtctcttcaatcgcttgtttttccggttttgacgtcaatttcttcctgtcttcagctccgaaaataacccgtatgcttcctttatcgggcccctttgaaaattctttttgaatcacatccatcgccttttcagaaggtgtgtcgggaattgacatatcctcagaaaaagcaggttttaacgagatggcgatcacaatcgaagcgatcagtatcacgagccacgcactgatcattttgaatcggttgcgggcagaccatccccctaatttatataaaaaaccagacatcgaatactcctctccaatcattactttctgcctaattgtagttcacattcacataaaaaaaacgtacataggggcatgtacgtttgggcagtttttcattatatattcagtttcagaatgcctttttgcatagcaatggtgacggcttccgtccgcgaatcagcgcctaatttgttataaatcgatgttaatctcgcttttaccgtccgctctgagattcctaaatcgaaggcgatcgctttgcttttatgtcctttcgcaacggcttgcagaactatgatttccttgtccgtcagctgtgtttcattggcatttgcccgttccattttcttttcccggaaacgccgcaagatgtccggctgcagaagcacttctcccctgaccgccgcatccatcgtatgaaataaggtttctgagcttgtgtccttcagcagataaccgttcgcgcctgattcgatgccttctatcatcagatgatcttcattataggtcgtcaaaataataatcggcacatcagaatgctcttttatctgtttaatggcttccagcccgctcatttccggcatgtacagatccatgagaatgacatcgggctttagttccgctgcgaggcggacggcggttttcccgttttccgcctctcccgttatggtgtaatggtcatttgtttctatcaaaagcttcagaccttctctgacgacaagatggtcatctgctattaacactttatacatgttccgcttctccttgaattggtatgatgatctcaatttgagttcccgctgatctggcgcttgttatacggaaagtgccgttcatcatattgacgcgttcttgtatccccagcagcccgtaatgtccgctttttctcatttctgttccggcatcaaagcctttcccgtcatctttgacggttatgcggatctgtccctcttcttcctgaacggacacccagacattctttgcttctgcatgcttggcggcgttagtcaggccttctccgatcatgtaatggcaattctccgccgtatgaacgtcaagcacatgatgcacgctgtaatctaaaaaacaagacagcccggaggcttctgtaaaatggttgatttgttcagtgatgctttcttttaagaacccgatctcttctgatttgctgcgaaggttgtcaatggccgagcgcgcatcagccaatgtgcccttcactctgtccattgactggctgatgatgtctttcgctctgtcagtgttaccctttgaaagatgaacatgcaccgcttcaagctgcatatgcaagctgaccagcccttgtgcaagtgtatcgtgcaagtctctcgccatccgctgcctttcgttttgaagcgtcagctgtttcacttgccggtgagcgagctctaatttttcaagcgtcatctgtgttttgattttttcatcaacttgcgcgaaaaatgttgccgcatatgtgataatcacgatcatgatgggagcggcgataacgatgaaacgaagcagatgatgcggatgctcctggtgcagggctgctatggacattaaaatgaaaagatagagtatgagcggcgttttgcccttatccgccattccgataatctgcccgattaaaaaggcatagagaccgatgaccgccgcgatatagccgccggtcatcaagttagccgatgtatatatgataaatccctgtatgatgaaataaagaaacgtttttttcttgacccagcgataggaatgccagtgcagcacagcaaaaatgacgatcaatatcgtgaataacagcagcaataaaaccgtccagctttcataaatgtactgcaaagagactgatgcggcatataccataaaaataaacgccagaccgggcacccgaagcgcaagcatatgcaatgagcgtctgtcacgggagacatagtcttcttgatgttttgtaccaaacaatctctgtccacttccttttagccgaccggcctcacgatgttttattctatttgtcatcataccataatcgcctgcttctcaccttccccttctgtcctgcttgacgggtgaaagaaaaaacagcctgcgggattgttcgcgggctgcttttgttcatatcttttttatgacctttcccgggtttcagcggtctgtctcccgcgcggcaaaaccgcccgcgcatcagaaaaacgttcaggacaccgacagccattccatgtgaacaagaggaagcgattgtgcttcctcttttttaatgtaccgtcaaatttcttctctctttttttataaacaaaatttgtaagactagagctcttttctcaggggaaattaattatgtaattgagaagaggaggtttaaaaaacgattatggaaaagcgtgaattagcggctcacgagtcgctggacttacatgaaatcattaacttcaagacgctttgtgtagcgaaatccaagctcatgcaagggcttgtgtttgatcaggatctgaaaacgttaatggaaaaagacgttcagcaagcctcgcaaaaccttgctgatctgcaggcggtttatgaacgggcaacgtttcaggctcctgttcctcaaaaccggccgacttcgatcatcaattgaaaggaaggtaagcatcattgaaccatgaccatttagatccaatcaattcattacacgtccctgaactcgcagatatgacattcgcaatggattttctcatacgcgcaaaagaaggcgtcagaaataccgccgttgctttaacagaaaccgcctcgccagatgtaagagctttgctgcgcaaacagctcatgcaaggaatcgcgatgcatcaggaaattacagacttgatggtcagcaaaaagtggtttcacccgcatgatctgagcgaacagtataaactggaccagctctctgcgaaaaataccctcatggtcggaaacatgaatctgtttcccgttgaaacgaacagaaaagggatgtttgaccgcacacctgatgaacactaacactggaggtattacagcatgaaggccgtaacgtatcaaggagtgaaaaacgtcgtcgtcaaagacgtgcctgatccgaagattgaaaaacacgatgacatgattataaaagtcacaagtacggcaatttgcggatcagatttacatttaatccacggactcattccgaacttgcaggaagactatattatcgggcatgaaccgatgggcattgtggaagaaaccggtcccggcgtgacgaaagtcaaaaaaggcgaccgcgtcattattccttttaatatcgcctgcggagaatgcacttattgtaaaaatcacctggaaagccaatgtgatcaatcaaatgaaaacggcgatatgggcgcttatttcggctattcagggagtaccggcggctatccgggcggccaggccgaatatttgcgcgtcccttttgcgaactttacccattttaaagtccccgaaacatgcgaagaaccggatgagaaattgagtgttattgccgatgcgatgacaaccggtttttggagcgttgacaatgccggcgtaaaagcaggcgatacggtcatcgttctcggctgcgggcccgtgggccttttcgctcaaaaattctgctggttaaagggtgcgaaacgcgtcatagccgtagactatgtcaactaccgtctccagcatgcgaaacggacgaataaagtggaaatcgtgaacttcgaagaccacgaaaatacgggcagctacctgaaggaaatcaccaaaggcggcgccgacgttgtcattgacgccgtcggcatggacggaaaaatgacagatcttgagttcctcgccagcggattaaaacttcaaggcggggccatgagcgcattggtcatcgcgtcccaagcggtgcgaaaaggcggaacgatccagattacgggtgtgtacggcggcagatacaacggatttccccttggcgatatcatgcagcggaacgtcaatatccgatcaggacaagctccggttatccattatatgccgtatatgtttgaactggtgtcaaccggcaaaattgatccgggtgatgttgtaagccatgtcattccgctcagtgaagcgaagcacggctatgagatgtttgacacgaaaacagatgattgtattaaagttgtactcaaaccttagagaacggaggctacagaaatggccagcgccttacatgaattactcgaaattcaggagatggcttcttttaagtcactttgcctgacgaaatccaaaaccatgaaagcgctcgtatccgatccgcagctgaaagaaatcatgcagcaggatgcggatacatcaacaaggcaattgcaggaatttgcctcgattttatctgatgcaaagcacgaataggagatgaatgacgaatgaatccgattattgaatacctgacggggatggatgcactgacagaccaaattgtcgctatggatttattgaattcggcaaaaagcggagtcagaaactatgcgatggcggcgacggaagccggaacgcctgaagtgaaagcgatcctcacccgtcacttagaagaagccatcgacatgcatgagcaaatctcacgctatatgatggaaaaaggctggtatcatccgtggaacacagatgaacaagtccggtttaatttgcaaaatattgatacggcgctccgcctgcccgtcctataaatgttttcctgctgagacagcacctctggctcagcttcagtatgtcaaactgagaactgcctttacagcgcccaggcaacgaaactcccgcgaatcagctctgcagcttctccagcctttcttcgggctgttattggggcttgcggcggtgattacgtgcgtggcggccgccgggcggttcgcaaatagagcgaagaaggcagaacaatttgttctgccttttcattattttctgccccataggcacaaatacttttcacccgattcgagcggcggttattcacgtagcttgaactcccttaaacgcactcatcacaagatcatgcacataggaatcattcacctcatcacctgtgatcaacaggcgatagaaaatcggtccgtaaatgagatcgatgcttacgtcaatatcaagattctctcttaattcacctttctgaattcccttttccagaaggcctttcgcttggaggcggcggggctggaaaaatcgcgtgcgatattcttccgccaattttgcatccagctgtcccgcaccgattaattccttaataacggttccttcccggctcgtcaaaaaccttgctaaattcgcggcgtgggtcaatatatcttgcactgttgatcctgtatcgggcacaggcagtctgtccgtagcggtcgaaagaaagctgtccatgataacggcagccttgtttgaccaccatttataaatcgttgccttactcactttggcacgctctgcaattttatcgactgtcaccgcgtcaaagccattttccaacaataggtcataggcagcagaaagaatcgccttatgtgttccttcatcacgcggccgtcctcgtttactctgcacatgaatcattccttcccgaattataaacgatacgttcagtatacttaacctgtataaaaaaagaaaacagaaacccatttacaaaactgaacgtttagtatattattcacttataaacaaaactgaacgtttagtttataaaataacttgagggaagtcttgatgaaatgcagactccaaaagcctctgcgtaaaggagatgaatcagcaaaatatttatcaaacctcataaaatcattaaaaaggagttcattcatatggctaaagaaaataaacaaacagcggatcaggggatttcaactggtttaacccttcttctcgcaacggcatgcggtatcattgtcgctaatctttattatgcacagcccttggcaggattcattagtgcggcaatcgggctttctccaagcagtgccggattgattgtcacgctgactcaaatcggatacgttgccggcctactgtttctcgtccctttgggagatattatcgaaaacagaaaacttgtcgtggtatcgctcctactaagcgcagccgctctaactctgacagcatgtgtgaagcatggaacactgtttttagccgctgcgtttttcatcggactgggatccatcgcggcccaagtgctagttccgttcgcatcataccttgcaccagatgccgcacgcggccgggttgtcggcaatgtgatgagcggcctgcttctcggtattatgctttcccgtccgatatccagtctggtcgctgatatatgggggtggaatgccatatttgctttatccgccgcgttaagtgttgtcctggcaatcgtcttatcaaaagtgcttcctgccagaaaaccaacagcaaacacaagctacaccgtcttactcggttcaatgtggaagctgctgcgcacgactccggtcttacgccgccgtgccatttatcatgcgtttgtatttggagctttcagcttattctggacgactgtacctttactattgtccggtcctgcttttcatttttctcaaaaggcaatcgcgctgtacgcattagcgggcattgcgggtgcagcggctgcaccgataggcggccgtctggctgatcgcggcttaacccggcttgccaccggaatcgctctcggtgttgtcatcgtttctttattactcccgctcatgattcagagcagctctcccgtcggaatagcagttctggtggccgcagctatcctgttggatatgggggtatctgccaatctcgtactcagtcagcgtgccattttttcgttggcacctgaattccgcagccgattaaacggattatttatggcaatcttctttctgggcggcgctataggatcatcaatcggaggatgggcatacgcctcaggcgggtggagtatcacattatggattggaatcgcttttccggtcatagcattgctttatttcaccacggagaaataagcctttcaccaaaaataagccgtcaggaccaagctgacagctttttttggggtgtattcttctttacatccatccgaacaaaacatccggattcatgaaaagatgatattgattctttacgccccgctcatatagacgggcgcatgcccgctgccgattctttcagcagcggtaaaaccatgtcataatatgtttagaaataattgtccataggcaggtgaaacacatgaagaagtatttatataaacaccttttgttagctctcgtttcgtccgtttgctttttattggtcttttatgtgggtttaaaaatgacacaggaagacacacccccgttgtcttcttacccgttttacctttttatttatctttacatagcagccggatatttgacggtcggccttgtttcagcctgtatgactgatatcttgaaaaaccgctggacattgaataaaacgtcttccattctattgaaacttatcgtttacttactcataccgtatgctatttttcattctttcttcattttaatggcgccgttgatttatgtgctgttcgagtcgttattcatcctgagaaaagcttcataatcagaaaaaaacataccgcatgctgccggtatgtttttaacatgcttgtcagttttttgcggtgattcgtttgatgttttcttccatcaagccggaaatgagctgttcgtttgtatgaggaatctgtttgagctgttgtacgaccagcccttgtcttgcggctgaatgattttgactcagctttgcctgtccctctattttgctgattttgattttaaaaccttttacccctttgttcatgcctgccagcaatttcgcatcgacatcctctaatttgtacgggctgtcggggctttcgtatttcaatacgagatcactcatcgactgcacggtttcttcctcatccaaaagctccgcctctccgtaaacatgaaccgccacataattccatgtgggaacagcctgattcgtctcataccatttaggcgagatataacaatgaggcccctgaaaaacggctaatacgttttggccatcaatctctttccattggggattcggcaatgcaaaatgaccgtataagcattcgttattcttactcatcatcaatggcaggtgggttgcatacggcatgccccccgccgttgaaaacaatgctgcgaaaccatactctttgattacatcgcacgcttcagcttcactcagctgaaatggagccggaatatacatacaaaactctcctctctgaacatggattgataaagcgctttccgctataataaaatatcaactgacatttaaaaagatacagtttcaaataaatacacatgtcagaggagaacatctgatgaaaaatttgattttcgctttcagaagcggcaccccgaaatacaaacaaatttacgagcaatttaaaacattgattgagcaaggaaatattcaggcagatgagcggctgccttccattcgcgagctggcggattccctgcgggtaagccgcaatacaacgctgatggcctatgatctgcttttagcggagggatacattcgcggagaaacacgcaaaggatattttgctaatgaaatagaaccctctttatttcaacaagaacatgatgttgtttacgctgagaaaaccgaatcaactcagccggccctgattgattttcgcgccggagccgtcgatcaaaagcattttcctctgaaaacatggagaaaattatacaatcaagttttggcatcagagaaaagctttctgtacggtgaaccgttcggcgagagaaacctgcgtgaacaaattgccgcttatctcttggaatcacgcggagtgaaaacagatgcggattcggttatcatcggcagcagcacccagcagatgctgatatatctcagccagattctgaaagaggatttttccggaattatcgttgaagaccctgggtttgacggtgccagagcggcatttcaatttcacgggctatctctggaaacgatgcctgtctatgaaaacggagctgatttttctcaattgcatgcaatgaaagaaaaattaatctatgtgaccccatcccatcacagcccttacggcgtaagcatgtccattcagcagcgccaaacactgatcaattgggtgaatcatagagagggttatattcttgaagatgattatgacagtgaattccgttatacacagcagccgtttcccgctcttgcttccattcaatcagaccgggtgatttatttagggaatttctcaaaatcctttctaccgggcatccgcataagctatatggttttgccgcagcgccttttgcaccggtataaaaaacggtttattcatttcgaaagcaccgcttcttcgcttaaccagctgaccatggctgaattgatgaaggccggtgaatggacccgccatattaagcgcatgcgcactgtctacaagcgtaagatgcagcacttgacttcacatatcaagcagcagttcggcgatcaggtgacgatcatcggcgagcagtcgggattgtatatattagtaagagttcacctgaactatacagaagaaacattaatcgaacgcgcctttcagtacggagtgaaagtataccctaccgctgtctatttcgttgccggaaagcccgaaccgccgatcataaagttaggtttcgcccatctcgatacggatcagatcacacaaggcgtacagcttttgagaaatgcttggctgtcatgaaagaaaaaaggcgccgaacggcgcctttttttatcttttatttcgtatttcttgggaatttcggcagtccaaatataatggcggcgatgccgcagattccgattaaaacgggatagaaagagtatggcaggatgctgacgggtgaaatattcccgaatttcccggctgataacagctgcgcgccgtaaggaatcaatccttgtatcatacacgaaaagatatccagaatacttgccgattttctgttgtcgatgttgaatttatcagcaatattctttgcaatcggcccggctgcgataatcgagatcgtattattggccgcagccagattcgtcacgctgaccaatccggcaatgccggcttcggcgccttttttggaacggattcgtttcgtgatgaactccagtaaaaagtcgatcccgccgttttgtttcatcacaccgaccattccgccgatcagcatggacaggatgataaggtcgctcattccggcaactccatccgtaatcgctttaaaataagaatcaaacgtcaggctcccgcccgccaatccgatgattcccgtcaaaaccaatccgccgaatatgacagccatcacattaataccgattaacgcaaaaactaacacggcgacataaggaagcaccttaatccagctgtaagatgcagcatccgtatggagggcgtggcctgccggaataaaaaataagataataacagtcacaatggcagcgggcaaaacaatcagaaagttcgttttgaatttatccctcatttgtgttttttgcgtccggactgccgcaatggtcgtatctgaaataaaagaaagattatctccgaacatagctccgccgaccacagccgcaatcggtatcgcgctggagatgccaagctctccgctcaaaccggcgctgatcggcgcaaccgccgcaatcgtgcccattgatgttcccatcgatatagaaatgaaacaagcaatgataaacagccccggcagcaaaaactgctgcggaataatgctcaaagcaagattgacagttgaatgcaccgctcccatcgcctcagccgctgaagcaaaggcacctgccaatataaaaatcataaccataatgataatatcaggatgtcccgcaccggaagcgaaccattctattttttgattgagcgatttcttccggttaaataacagcgcaaaagctgacgcaatgatcgcggcaatcaagatcggcaatttataaaaatctccggtcaccagaccagagccgacaaaaagccctacgaataagactaaaggcaataacgcccaaggattcttatgattgttcatctgggtaaaccacctcttttcagcattaaagtcgctaatcacagtctaagcaacatttcacactttaaaagtctgcagtaaaaaagtcaagctgaaaaaaggataagtaatgattgataagatagaaaaagctgttttgtttcctctctttagaaaataaaaaaaaccaaggctcgtttcccttggtacatttcatgcggcccggcgcccgggacaccttctcttcattcagaaatacattcagctttcaatctgtttttaagtttcgcttcattttccaggatatcttcgtaatcctcaatcttcctgtttaatcgttttatggtttcatcaatttccctctgtttctccgtcagccttttcctttcatttataaggatgttttttcggggttcgatcgtatgatcggctccttcaataaataaagcggtatattcaatcagcgcctcaatcgacagcccggcacttctcatgcattttataaattgaatccaattcacatcatcttcgtcataatcgcggatgccgctttcatcgcgttttaccggaggaatcagtcctatactttcataatacctaagcgtcgcggctgataactcaacctgctttgcagcctgcgcaatcttcatattcttaccacccatccttcatacctttcataagcgtgccattatagaatatcatttcataaaaaaataaaccaaaccccttgacttaaagtccgctttaacatttaaagtaaaaccgaacagaggattcatcactttatcttggaaaggaagataaccatgtgcaataatcatccgactcgtgtattaagcgctccgcatgccaaagctaaatttgagcggacgacgattgagagaagagcattacggccgcacgatatcctgattgatattaagtacagcgggatttgtcactcagacatccacagcgcattcgatgaatggggcggcggaatctttccgatggttcccgggcacgaaattgccggagttgtggaagccgtgggtgaagaagtcaccacatttgccgccggcgaccgtgtgggtgtcggctgttttgtagactcctgcggggaatgtgaatactgcctgaacggagacgaacaatattgcacaaaaggcgttgttcagacctataataacctggactacgacggaaaccctacgtacggaggctacagccagaaaatagttgtcactgacagattcgttgtccgtattcccgatcagctggatttggatgctgccagtccgctattgtgcgcgggcattaccacctattctccgctgaaacactggaatgccggtcccggcaaaaaagtggcgattgtcggaatgggcgggctcggacatttagccgttcaattcgcgcacgctttaggcgcagaggtcaccgtcctcagccgctcaatgaacaaaaaagacgaagcgcttgaatttggagccgatcattactttgcgacaagcgatccggatacatttactgagctggccggacgatttgatcttattttaaatacagtatccgcgaaccttgacgtagatgcctacttatccctgcttcgcattgacggtacattggtaaatgtgggagcgcccgctaagccggactcatacagtgtgttctccttaatcacgggccgccgcagcattgcgggttcactcgtcggcggtattccgcagactcaggagatgcttgatttcgccgccgagcacggcattgctcctaaaattgaagtgataccggccgatcaagtcgacgaagcgtacgaacgggttctccaaagcgatgtccgctaccgtttcgttattgatattgcaactttataattctcataaaaaacataccaatatctattggtatgtttttttcagcccagattattttttatttcagcagccatccgggcaccgctttgatataaaccaattcaccgatcagctcaacaatcgtctgtgtgacgataacagcagcggctaatgaggcccaagcatccggcaaagccagcgctaacggaaggactgcgagagaattccttgtgcccgtgctgaagatcaatgctcttccttcacctgtatccagacggaacgcatatgcgataaaacgggagacaaacggcataatgagcaggaatagcagatagatcggaatcacacgtataatgatgtcagcatcattgatgactttgccgatttgtgtggcgacgaccgccaataaaaccagagccataaaaggaacaggcagccacgccgtccattccaacaccttttctcccgccggtttcttatcagcccataattgagtcatcaccgccgccagcagcggcaccgctattaacaataagaatgcttccagaaacggtcccgcatgaacagctcctatcacttctttcccgataaacagccacaggtataacggaagcaataccatctgaacggcgaacaaaaccggcgtggaagccagtattaatctctcatttcctttgccgagctgagtaaagacgatgacgtaatcaatacaaggtgtaagcaataccaaacaaacccctgataatataggaggagattgaggaaaaatggcggttaacacccatacaacgacaggtacagctaagaaattaccgatcagtaaggccgccataaacttgaggtttgacatggcttccctcagcttcaagaatgggatttgggcaaacatggcatacatgagaacagcgataaacagtgatatcgtccatccccagcgaagtcctgaatctttcccggcgatccccgctattcctccgatcacaagagtcacaccatatatccaaatttgctgtttttctaatgtctctctggttattttcattggctgacacctcttccccgcccattataccttcttttctgccggaattaaaaaacaccaagggtctgtgacacttggtgttttcaggacgtgttattgttgtcaaaaccgcttacgaaagcttatttgtgttctctgtcctgccaacgaataaggtgaccgcaacactcgctgaactgaccaaagtccccagaacggcagcaagaattgtcaaaaagccattgggaatcagaaatccaatcggaatgaggcccgcaaacgtgagaacgataaaacattgatagactccggatatgattctcacaaccaagctgctaaaaaaggacatgacgaatggcggaatgaacaaacataaaatgattccgagtgagatcaataaaatcataggctcgtcaaaagaaatgacacgattgccgggagactcttcagccgccgcgaatacagcaaatatagacatcatcagcgtaagaaaaacaagaaaaaaccttttcagcaacgttatgactccttttttataaaaacgggtatctttttttcaatcacaataaccattttatgttatcaaatgaaataatatgaagtcaaaccgagttctgcacctgatttatcggttcttatttttttgataatttccatataattgtccgcaagcagcatctatatcaatgccaaattgacttctgacggtcacgttaattcctgctgactttaattttttatagaagtttacaacttgtttctcatttacttcttcaaatctcataggtgaactaacagtcgggttatatctaatgatgtttacatggaacaagttccctctcttatatctgcttcttaaaagacgtactacttcattcgcatgatcaatagaatcattaactcccggcagcataatataagcaatataaacttttcttgaggtcacacgtatatgctcatctaatgtgtccattacctccaataacgggaagcgttcatttatcggcattaacttgcttcgctgttcattaaaaggagaatgtaatgaaaacgtcaggttgacctgcggataatcctgagtgatttttttaatgcccggaataatacctatggtcgaaatagataaccgacgagggcttaaagcaaacaactccggatttgtaagcacatgtaaagcatcaaaaacttgtacattcgctaatgcttctcccattcccataaaagaaatactatcaattgaatgtccttttaagtgaaagtacaaaatttggtcagtcatttcatctgatgttaagctgcgttttaaaccaatatctcctgttgcacaaaatgcacagccaaaatgacagccgcactgcgaggatatacaaaatgactcccagccagctttatatttcatattgaccgtttctattttttcgtctcctgaaatttcaaataagacttttgttacttgctcagaatgctgcacttttaaagcagcaatatttaaaattgactctccaaactcattcattaacaattttctcaaggatttaggaagaaccgttatttcattaaaatgatttattctccctttgaacacagcatttttgatttgattcattctaaaatcaggaaacttattttgtttcaggaactcttgaattcttatatacttgtttttttgttgcatgttttctcatccttccataaaactctggtttgtttgagtaaatagaagggagtgatcatctaacctttttttaaaatcaggcacaaaaaaacaccgacacaattatcggtgttacgcttaaataacatcatgcacaaataaacaaggacattatgtcattggattatcgtttatttgacatagagaaaaagcaccgataactgtttttgtatgatgatttggcttaaaaaaggacagactgctccctttatccgccaagatgtttccaatttttgcattttcaccatacaaaattccataaatcgttatcatcgctttcacctctttcttgtcaatattaacaataatcaccatatcataagggttcccttatgtaaagttaaacaaatgcttacgcccccgctaatgacagtattataaaacttgcttattaagcctaatccaagtacagaaagcgcgctgatcacatgtttcacttatccgcgacggaacatttcttatataatgggtgaccggcagctgcctgcttgaatcccaatcttcttatagtgattttttatattcatgacagtatgatgatttgtcacttcagcaatcagatcgtttattcgatccagattaatcggtttattttctgataagctgctgaagctttctctgatttcttcaggatagacatttccggccatgcttgacaggccgttacacccgttactcagcatcttcggaaattcaacgtctcctgccgcaaacaaaataaagtgatcagggaactctgtttgtttatgacgcagaacgtctcctccttctttcagcccccttatcccgggatgccggcttattaagtctttaagcgctttctcactcagattaaaaccggtccggccggggttattataaagcacagcctctttagaggtatgactgagaagttcgtcaacgtaataaacggcttgctgctgtgtcggtcttatataaggaggaaaaccaatcagtacagaatcaatattggttttctcgatgtgtttcatcagtttgacggcatcactggttcttacggctgaaacaccgaacatcagttcaacatcttcaaattttcgctgattaacatactcaatgatctgaagacgctcatctatgctgagtgaatgctgttcaccagtcgtgccgcatatgagtaacgaatggataccgctgtttttcaaatgttcgacaatagcatcaaatccttctaaatataaactttcatcttcatgaaaaggcgtagggatagcaacattaaaatttcgcatgagaatgtcctccaagtacatattcttgaatatctgcagagtatcatataacactgtctgacatttaaaaaggtacagtttcagataacgcaacatgtcagatgtaaagccgacacacaaaaaaagcaggcaaagagagcctgcttcatagcttcgtcttacagcggcccattccccggatggcttgacaaatatgagtaataaggcaaactgatataaaaattgtgctaatgaggtggggttaatgattttagatttaaaaggtgaaacgcacatggatcatcttgtgggaacgctgtattctgccgttaatgaaaatgacagccgcttaatatccattgtgtcagacatgtcacagcaggagattgattataaaggaccaaatcatcaaccattcaatggggaatatggcatatggcagaccataatagatatcatcaagctcatattcatcagcttcgcaaatggtatgaagagaaacagaaacttggcagttaaagccgcttattaggaggagcaacgataaattcattacaaatgtctattttcactgactgccaatcaattaaaatggtcagacaaaaatcgctattacatttgcaacgtatcttaatccggccggcgcagttgtaataaaaaaagaccgctttcccctcttcttcaacgtaactgacatcatcatcttcatttttcttaacataaggttcagcaaatcgttcctcggtatattccacacattgctttcaaatgcaggtgcaattctccttgaaacagcaaatggttgtttggtttattgaattctttcatattaaaaaatggagtcattttaatgatcatatcagtctccttccaaacgagattgcatttacccattatttgttattctgcaactgaatcattatcttttatatcaggaattcttacaaaaaagtaaggtaagtgtaaggtattcgcatttattcgatatgcagtgttcattagaataagaaatataaaaggagtgatgaagaatgaaaaacatgagcattttcattattatattaggctgcctatcggttttcatattaggaggctgcgctgatcaaggcgccgtgctggaaagcgattattacgtacaaattcacggaaaagcggaaaaaaacaaaaataatagcaactacgtttacaatttagaagggtataacgagaaaggtaagaaaaagatggtttctttctttgttgaaaagccttatcaagaaggtgacattgtacgcgttccgaggagctatgagggttataccggagaatctgaagctattaaggccgagaaactgcctgaaaagatcaaagaccgattcaacattgagaaataacagcgagttgagcagatatttaagtctgctctcaattttttacgacaggttcattcgaatgcaaaatgcaggatggctccttgggccacttctacataaaagattgtgcaaattaagcacaccctccccattttctttttttggctggttacaactatcggaagtggcattgacaattcttctatggtcccaagtaattaatgaactctatagtgggcggatacgtatacggcggggtttgcagttttttaacttcttgttatttgagctatttcgacttttacttgaaagaattaaattagagagtctgaacgaggagtgaagcacgcgctccatgtgaatccatttagttcaaactgaatatgcgcggactaaaatagttgcactgatggacgtattcaacacaaaaaagagcagtaaacacgtaagttactgctctcctcagtctatccgccgttcatttgttttacaatgtattcagcatcatttcctacaccttgaagcagcgctgaacctcgcctatgctgccaaggcaaaccaataaagtacaatccctccgcagctgaaacaccccggtgatgtataattcggccttccttatccaaaacaccttctattttcatccaccaaagcggattcttaaaaccagttgcccaaataacattgtttacttctaatgaagatgaatctttaaaaatgacttcattttgctttccggctatgactctttgttttaagatgatcttcttctgtcttattgcatgttttaattcatacccaaatatgaggtcgcctttcttttgaatgaacttgcctaatattgatgtatgacttgcatgtaaaactcctaatttatcaaaccaccaaaagatgcttctttttccaatccataaagggaaataaaccggttttttactgcaagccaaatatgtaactctttctttggataactcaacagctatctgagccccgctattcccgccgccgactaccagtacattcccaggcgccagttgttttgaatgtttatattgtgaagaatgtaattgacgaatatgaccggctacatcctttgatattgatggaatgttaggggtatgaaaaggacctgcggccaccaccagattcttcgtttgatattcttcccggtttgttttaattaagaaatagttgtttaatttttggacacttattacttctgtccgtaattggatcgggatttcaaatctttcaacatattttttcagataagcagcaatttcattttttgaagggagtccatgcttgtctccttcaagctgcattcccggcaaagagctgtacattcgagaagtaaataagaccaatgagtcataccggtttttccagctttcccccacttcatgacttttatctaaaatgataaacttttgtttcgacttccttagataatatcctactgagattcctgcctgaccggctccgattactatcgtgtcgtacatatgaatccccctccggttttatcttaattgtcagcagacaaagttagtccctatctcctcctttaatgatgatgatggtcacgcggattctcagtttgggcctgacaaagaatcgtattgtcgtgattatgcgctgccgtttccatttgaatggttacatgtgtaatgccttgatctccaagttcatgttcaattttgcgtaaaatactttcactttcagaaatggtcagctgatcgttaacaacagcgtggcaggaaagagcattcaatccgcttgtgatagaccatatgtgcaaatcatgaatgctttgaattccttctgtctcttcaattgtatgaatgatgtcagtgacatcgatattttccggagttccttccattaatacgtgaatggagtctttcgtcacatggtaaccgcttctcagcacaagaatagccacaatgacactggccactggatctgcccagctccacccgaagaagatgataaggatcgcagccagtatggcacctacagatccgagcatgtcacttatcacatgtaagtaagctcctctaatgttcaggttattctttgtatctccgccgttcagcataatccaagcgaccaatatattcacagctaacccgatgatacttatcgtcagcatgccggttgttgctatctccggcggatgagagaaacgtttgattgcttcataaatgatataaagggaaatcagtattaatgcaacaccgttgatcacagctgcaagaatttcaaatcgtttgtagccgaatgtcttatgatgacttgcctttttttcggccaatttaaaagcaatcagagcaaccattaatgagattgaatcactcagcatatggcctgcatctgacaaaagcgctaaactattggttaaaaatccgcctatcgcttctattatcatataacctgtaatcatgataaaagagatcaataaaaccttcttattggatccgccagcgtgattgtgattgtgacccataaaaatctcctccttatctaatacactgtatttattatttcttttctgctatgaagcattctaacacggacacaaaaataaccttatatgattatgtgctcatatatgaatatataggttctttactgaaatgtcaaaatattttcaatgaaaatgtttcttatcattagcttagcttgggaggttgcattgctatgaagccgcggattacagtaattactttaggcgcagataatttagaaaaatcgctgcacttctatcgggatggcttgggtctgcctacagaatacagaaggaacagccggtacagatttggacgacttgcaaacgggactgaaacttgccctctgggaccgcaaagacatcgcacatgaatcaaacgttacgataactgctcccgctcatgatactttttggggcggatacgccggtcacttccaagattccgacgggcacttgtgggaaattgtttggaatccgcactgggaatataagtgaataaccaacttttatagcaacaataaaaacacacctgaatgttctggtgtgttttttattttgtttcccacaacgatcaaactatttatacgatggcgggatgctttgcggaaaacggaatacattttcgggatcgtatttcgcctttattctttgaagccttgcaaagtttgagccgtaatatgcttttccgaagttctcgatattttgatccggaacattcacataagaacctgttacatatggtttcatcagctgacgcactctttcaactgatgcaagattcgaagcttcttgtgatttatttttccaactggccgtccattccgtataaaataacggacggcgccaatagaaggctgtttcactgcttggaactctgcttatcgcaccgccccaattgataaaaaagaaattggtttctgtcccagtcgctttttctaaaaattgtctcattactgcaataggttcttccggccaaagattgagcgcccacgccgaggagaatttaacactctgatcagacctgccgggaatcggttcatcaggatctaagaaatctatacaatccggatagtatagtgttttgattactgtttgtgccggcgttccggcatttaataaaggttttaataattgaatcagctccggttttgacccgaggaacaatccttccgcatggcacaaaccatttactttgctgtaaatctcaaggtagcatcctaatcgttcgtctgtaaacggtgcccatttttgccatgctttgaataccgtttctaactgttcccacggccaaataatattaaagacggttgcggttttaggggcacggtgaactttgaacgtatattgggtgttatatccgaaattgcctcctccgccgcctctggaagcccacagtaaatcttcattgcgggaatgatttgcttgaatgatcctgcctttggcatctaccattttcagtgcgagaaggttatcacttatcaggccgatcgatcgtgaaagcactccaaatccgcctcccatcgtgattcctccgattccgacggttggactgtctccgaacggggccataaaaccttcccgagctaaaccttttacaagcgggccgacgtgaatgccggtttgaacggttgccaccgcgtttttttcatctaagaaaacgttattcatgtcactcacatcaataacaatcccatcacttaccgtggaaagatttttatccagagcatggcggccgcttctgacacgcaaaggcacattcttctcacgagcccatttaatagcattacttacatcgtatgaattttgcgcaaaaacaaagacaagcggacagacatcaacataagggttccaattcttaaccgcctctgtatagccggggtcccctttgaagatgacacgtcccgttaactgtgctgatcccatctatttcactcccaataagcatttgattcccataccagtatatgtaggaattggacaaattcttagacagatgttctgcaaacttaaaaatagatacatatacgcgaagatgagaaaaaacaaaaaaaagacaagtgcggcaacctgccgaaactcttgtctctcctgccatgataggcacttacatttattggcgtgatatcccgaccaaactatggaagtccatagaacattatgtttgccctgccatgcgtggttctgctgagcaatctttctgtttgatcccccgacaagaatctttttctttatcgtttttgcacccctgtacggataaaatcaatacacattgaatcttatcttttacatgatgaaaagctcttattttttcttcttgtgcttacgtttgcaatcatgttttttctctttcttatgacgttttttacatttcgcttttgctttggctgctaattttgccgcttctacctttgcttcagctgctgcttttgctgcttctgccgctctggctcttgcttcttccgctcttgctatggcttcttccgctctggctctcgcttctgcttctcttgccgcttccgctcttgcatcgtcgtccgccatatcaaaatcatggccaaggtcacaggcctcgttgtatggctttttcttctggaagtactgttgatcgtcaccatcgttataatacattacgccactccttctctcattttttaatctctacatactatgtaaagaaagatctgcagcttggactggtattttgatgaaccggcacatttttagggcaattttcatttatcattgcaacagaatctggatgcctgcatgaaacttgaatgattttgacgattatcttaagcagcgtaaaaagggagactacgaaaaaaccaaggggttaaacccttggtttttttgtaaaaatgataaaaaggatgctgcacgctgcagcatccttctgtaccaactttttattgaacgattggaaagtattttttagcttttagtttgcttgctgtgtttgttttactggttctttgctaaaaagtccgacaatgttccacaagataatagcagcagctatgattacacgagccgtactgacttcttgattagtaaacaatttatagccatatattgatcccaatgctgctatgcaaaaaatattgaaccatttactccaacgcaattagaaaactccttataaaagattacatttccaaacaatatattataatattaacaaattttttcaatatttaaccttaaattattcttaagtggttttcctgatcattttctctaatcgtcattcgatctttcggagttttgatcgtttttttgttacaggctagacccagacatcattttcagctgtttgatcagttatttcctgcccggtattgacaacacctttaggttctgcaagcaaaatgttacactctgattctgcataaggtttatgttcaacatttttcggaatgacaaacatttcaccttcatttaattttacttttccatcacgaaattcaatgattaaattacccttaataacaataaagacttcatctgtttcgtcatgcttatgccaaacaaaatccccttgtactttaacaagtttaaaattgataatcattcatttcagcgattacttttggagaccattgatcttggaatgcagataatttctcttggaaattaatcggtttatattccattctttccccttcccgtgtaaaactcaatcatttaactagtcccaaattaaaggcctgtcaacctcagcagttctgaggtagtctaaaagctgaccggtatgtacagactcatggtaagcgattcttaataacatgtctcccagttcgcgaatatatccaacatcagacctgtcaatctttatatttgttaaatctgtttcgtttaacgatttgatgaatgtcaaaaacgcggcccgatacggttttgcaaattctaattcttcgcttactgtggtaaacgtttttgattcataaggattaatagtttcctctgaaaactcactcatatttttcattaaaatttgatgataaagaaattccgcttctaatacatgtcttatcatttccttgcacgacatggcttcggagtccgggcgccagtccattttttcctcaggtacagctgtccataacttgatgcttcgccgtcttacctcttcaaaatgtaaaacaataaggtcaattgtattcaagtattttcccccttttatttttaaataataattctccttcttcccggaaaaaacctcttcaaataaaaaacatatcctttcccgactcgccggattgataatcaaactatttttaagataaggagatattcattcatccatacaatagactctggctgaacatatactgaatgatagttttcatcagaaaggagaaatcagctttggcaaaatatcggatcatgacctttgacgggggcggtaccttaggtgctttaagtttacaactattgaacagactggctgaagaaaatccggcattaataagccgaacccatgtatttgcgggaaattcaatcggttcatttactgccctggcattagcaagcggaagatctccgaaggaaacacttcagtattttgaggatgaaatcctgcccgcattcagcacttcccggccgggcggacctgtttttaatcagcaattaccctattccggttttattaaagcggtacgaaactttttcccgccaggccttcgtcttaaagatgtaagaaaacgaattgttgtcccttcattcaaattatactccccggcactggatcgttggacgcccgtattatttcacaactttcccggctctccctatttaaatgagaaagtgagtgatgtcatactgcggagcagcggtgctcccgcgacacagcgcgcctatcaaaactacgtggacggatatgtagtggcaacgaaccccagtacggccagtatcgcgtttgcggttggtaaagccaacgtgccattggatcaaattgcggcgctatccatcggtacaggtgaagccccgactcggttaagaagagatacgaggggatggggaatggtaagtgcggataacatacgtcccgaaaatctgaagaaccttcctccaaattggggagtccttttggacaggtcgcctaatgaacctttactgccatttcttcagatgatctccggcggaaatggctactatgaatccatggtcagcgcgaatctgctgggagatcgctttttccggttagatccgcggattcctaacttctccaaaacagacccttccgtggttcccgctgtcattgaaattgcaaacaaaaccaacttacagcctgcgaatacatttatagagaaaaactggaacgacagcgctaaataagcaagaagtttacatcatcatacaatgaacaaaaaataccaagggactcaaacccttggtatttttaatgcgttcaatcgggccatttattgaatagaactgccccagaagtcgcttcccattacgtaaagaaagcgacttttagatttgattttcaagttccttttacaaattttgaaaaggccattgactattcagttgtactgtattaagtttaactatatagtcgaactgaatagaggatgaggatatgaaacataaattattaccgctgtctgaaaccatgcattatattttattagctctgcgtgagccgcttcatggctatgccgccatgcagaagatagaaaagatgagtaacggaactgttattttagcagccggcacattatacggcgcgattgaaaatttgaataagcatggctggattgagcctgttggagaatcaggccggagaaaggtttatatgataactgcggaaggaagcgccattttgaagatggaacaaaacaggttactgcatattttatccctgcacgaaggaagtgaatcgaatgaagaaatttaagatgttttttgatattgaaaaagaggagcaatggctgaacgagcaactacaaaaaggctatcgctgtacaaatatcagcggattaggaatatacactttcgaaaaaaccgacaaaaaatatgtgatgagactggattatcaagattgtttatcaaagaaaaaatttaaagagtacaaagaaatctatgaagacttcggctgggtttatataaacagcccatggcttagcggaactcggtattggcaaaaagaaaatgatgatcaaaatgaaatcttttcggatcgccaatcaaagagtaattattataaaagactaatggggttttcatcttgttttggtttactgtgcttgttttattcttatttgatttacaaggattcgggtttatatttaactgaaggtctgtggagtatggaaagcgcaatgttttggaaagcatttttatttgaaactccatttgccctgttgaggtcgcttcccgcccttatggctgttctatttggctgcagtttctataaaacgtatcgaaagtattcaatgttaaaagaacaataacacggggaagttacattcaaagaagtaattgaggatcatgcatctgccgaagccgggcgctttaaaggaaaaaaagcgccctgaatttgctgataaatcagatgacttattttgttaatgatacatacttatttacaatggcttgagcgagacaggctgatgaatcaacaatagtaagtccgcttcttttttggtccgtgaccatatttaaatccgtacatgcaatgataaccgtatcagccttttctgctaagtcatggtgtaattcatcatataatgtaccagcctcatcgatttgaccttgtttaattttttctattatttgatcgacatagatttgccaactatcttgatgtaaaaaatcataaccttctctgtttaacgcttcttgaaatattccggattgaaccgtaggaacggtggctaaaagagctgctttttttgagcctttaggtattttttttatggtttcatcaatcatgttcagtaaagggactgaaatcgatttttttatttgattaaaatagagatgtgcggtattacatgggatggcaataaaatcaacacccgttttttcaagctttacagcacccttaataattgcattttccatgtccgtatgattgagaggtttattcatgtagaaaggtgtcggacaggaataaatcatcatatgtggaaaatccgtgtcatgtattgctccatatattttttggcactcgtctacgactttatctacaaatggcccagtagattttggccccattcctgccagtattccaatcataattgtcctcctctgtaaaaatgtgtacgaatacgatcacgatgagttattcttgtgtttctcatctgaatctgctctcatttcttttctggctttcttctcctattttatcatttcattaattgaaaaagggctttaaaaaagatagctggcaaaccagacgacttgctttaagtaacggcgcagccgcaaacaaaaaataccaaaaacctcagaacccttggtatcattgtgatgcggctgagaggacttgaacctcaatgggttattcacccgctgggccatcaataaagtgaaactgtgttttctattacaaaacctttatatattagtgtgtgtttatattgatcatgttattttacaaagattaattcatattgtggagtaaaaatggagtcgtttttttcatcaccagaaagttacatgacatgtcttgggtgccatgtttgttaaaatcaccatcttcgttttaaaacgtacaggtttatagtgttccaaaacgctgtcctaaatgcaaaaaaatactggacgcaactaagtcaaatgtttttcacggtactatagtcaagacttgcccaagtcaccattatcaaaaagaattaataagaaaccaacgggtgatgaatcttttaatctttcattttacccgctgactcatatcaaaggagctttaaccaaattttaatagctgtcgcacttattaatagcgctaaaatccattgcaggaattttgtatttgctttttgcccaacagatgcgccaataggagaagcaatcaaactggcaatcataagaaccagagccggtgtaaaaagaacctggcccgtgattacttttccaactgttgcgccaatagatgaaagaaatgtaatcgcaagagatgaagcgactgtgattctaacagggatatttaaaatcgataacataatgggaaccaggataaaggcgccgccagctcctaaaatacctgatacgccgccaatgagaaacgctagggacgaagccaaccatttattagatatcacttcttcgtcttcgctatgttcttgtccttttttaggtataaacattaaaataactgctagtatagccagaattccgtatataaagttaattcctttttcagatatataatgagaaaagtaactccccaatacactccctaaaaggatgctgcttcccatgtacataattaatgctttatttaaaaaaccacttttacgataagcccaaacacccccaagtgtcgcaaagaaaacttgaatagcccctatccctgaaacttcatgggcagttaatgacatcactcccactaaagaaggaatgtataatagcattggataattaataactgatccgccaatacccatcattccggaaataaaggcaccaataaaccctataatgaaaagagttgtgataaaagcaatatccattttggttcctcctttcaaagaaaaagggcatctttgtattcgataccctttcacattcattagctttttttaatccagaattttaatacatcgccttcatcagtttgctctaaaagatcatgcccgcctgatttagaccaagctgcaagatcatttttagctcccttatctgttgcatgcacttctaatatttgacctgattccagttcattcatcgctttctttgttctgacgattggcattgggcatgccagaccttttgcgtctaatactttatctgatttcatgttcatctctcctctttttaatagaaacttgagttaccgtattgcacagcggtttggaccaatctccatttcacgctgtttttcttcatctgggctgattttccccatgtttgtttctcgaatctcttggtatgcatttggctgcggaggcaaatgatctgttactaagtgtctgaattctgtttcatccgcaatgttcaaaccatggttctcgctaaataatgtacttagttttttaccaacacttccatccttatttagctcgtcaatgatcataaagtgtgccggtaatacaattaaatcctgtgacaacgctttgtaacggctataaagcgttgttcttaaatctcctgcccaatcttctgccataccggctaagtctggtctgccaattgaatcaataaacaagatatcacctgaaagaagatactgatcatcgacaatgaaagaagtggaaccaatcgtgtgccccggagaataaatcggttgaattttaatctttgtatttccgatggtcatgtcgtttccttcttccaacggctgataatcgaataccgcttcttcagcatctttaggcggtaaccagtaggctgcttttgttttttcagcaatgactctgccgcctgaaatatggtccgcgtgaagatgtgtatcaaatacgtgagtaatcgtcgcactcttctccttcgcaaaatccataaagaaatctaccatacgcgtcgcatcaataatcgccgcttcaccattggaaatgaccatgtatgataggcagcctttaccgattcgaacaaactgatacatctcaccgccatcttttaaatccccgacttttaccggctctaaatgttcgctccatgctttcattccgcccttaagataggatacagaatgacctgcttcagaaagcatttcggataccatgacagatgaaccttcttttgcacaaacgaccagcacatctttatcagaaggaattttctccaagatatcttctacgccatctaaaagatcgaaatacggtacatttaaatggttaaaatcatgtccttcaatcttccaatcgctaaagtcattttcattacgtacatccaaaataaataaaggttctttgtgaaagattttttgtgtgacttcttttgcggtaagtgcttgcacggtcatgtttacatacctcctttttctgttttacctgtccagtcccgcataccgggaataacattaataacctttttaaaaccttgttttttcatggtgtgagctgccatttcacttcttcttcctgaatggcaaataatataaatttcatcatttttgtttaattcgttaaagcgcttttccacttcgccaagagggatatgcaccgctccggggatatgagcttcttcatactcctctatctctcgtacatctaaaatgtgaagagactcatcacgatccactttctgtgtgaaagcttctaatgaaatctcaggaattgaagatgcattttctgatgaatgctctcctccttttcgaagaaagtgacgaaggacttctccctctgtttcagtacctagatattcatggcctgagctttttgcccatgcttgcagatctgccgccgatcctttatctgttgcttgaatttctaataggtcaccagcttttaattcttttattttcttctttgtttttacgataggcattgggcatgacaaacctttagcgtctaatacaatatttgctttcacggtttttttcctccttttcttatataggggcggggtatataaatatgcaaaaagttattccctggatgttaataccatgtattcataccgccttttatatttgtgatgtttttaaacccttgtttcttcaatattttacttgcctttacacttctcattccgctttgacagatcacaaagacgtctttgtctttcgaaagttgatgagtttgacgaggcaagatagacaaaggaatatttttgaatcctttaatatgccttgtacggaactcataagaagttcgcacatctataaactgtttgtctttgttttccgcctccgattttaaatcagcagttgttatttgtttaacaccatgcaatgggaaaaaacgtcgaaatacgatccaaagtattgaacattactccgctattcatagtgttatatcccccttcacttattcaattgcaatggatcacattagataaataagttgacattgccttcctcagcgtctgccaaataagcagctacaccagcatagtcgatatcatctaatagttctttttcctgtaaaccaagaagatccattgtcatcgtacaagctacgagctttacaccttgttcttgagccatctcaatcaactgaggcaacgtaagtgcattatgctttttcatcacatttttaatcattttagggcccatacctgcaaagttcattttagataaacccatcttatcggcaccgcgaggcatcatctttccaaacattttttcaagaaatccttttttcactggaatcagctcttctttacgtaaagcgtttaatccccaaaaagtatggaagatcgtcacttcatgatcgtaggcagcagcaccatttgcaataatataggctgccattgctttatcatattccccgctaaataaaacaattgttgtgcgttttgtttgttttgtcatgtttattctcctgaccaatcactattacccctggggtatattgaaattaaaaattttttcgaaagatctcctattattcaattcaacatattaaataccggtaggggtatattataatgaatataaaaattcgtcaaccttaaagatgataggttgatgaatttttttatcggctctttaccaataagtcgaccgcttcttttactaagtgttgtgtgtcttctcccttttctaaactttcacgaacacaatgttcaaggtttgtgctcacaatcaaacccattgctcgatcgatcgcattacgtgaagcagctaattgggtcacaacctctctgcaatcttttccttgttccatcatggtcaatacaccttttatctgtccttctatccggcgtaagcgatttttaatcttttgatcatattccatgcgttgaactccttctttgaaatttatatatttgcatgttatccactatcatttcatactgcgctttatcacactacattattaactagataatgtttgtgaatcaatattatacccttacaggtatactgtcaattttcaagacggcatgagaatgattttaaagagttaatattagtatcccctgtttaatcacaagaaggcgctgaagttgtacgtgatttaatgcgtatgaagaaagagaaagcacttaattcaagcgaaaaaaatgttggataatgcatatgaatttttgattagtgaactggaagtcattaaaggaatcactgaaaaacaaataaaaagtttctgttaaggttaatgacagataagtttttcagagtattacgatcagacgttcaacttcttcaacttactttttaaacattaaccgcttttattactcctcaatctaatctgttatatttttttcttcaacgaacacttgaattctcgatgaaatagtcacttgatttttgtaatcctgattcaccctggcacggacaaggagccgtaacgatggaagagaggcagggctttcattgttttaggtctaagtgattatttccggaagaaaaaacaaccactctcccctttatctttcagaatttcttacatctcttgcgacagtgaatagcagttgtttatcttatttcataaaaaagatatgcgaattgtaacaaagaataacataccgttaccttgagaacataaaaacaaatcatttatatattccacatatcgtcaatccggtatgttatactgtaaacaatcctttgaggttttaaacctttttcttaccttgtagcatctgtccctactcgaacggtgagtagggttttttattcagtatgatacagagaacataaaaaaacaggccctatataaagagcctgtttgtataaacgattgaagattaagcagttttttgaacgttagcagcttgagctccacgagcaccttgctcaacgtcaaacgttactttttgaccttcgtctaaagatttgaatccgtcactttggattgcagaaaagtgtacgaatacatcgtctccattttcacgttcgataaatccaaaacctttttctgcattaaaccatttaactgtaccttgttccatttttgttgcctcctagtgtattacacattgtattactatccttgcccaaagtatcatcaagacgaaaagtcgatattcatactatcctttacacgaacaaaaataattctcctttatcatagcacgaaacggaaataactgcaaattaatatcatgtttcattcagggttttatttgttaaacgtgcggcaggtttttttgcgagaaccttcatttggaaattagaagttttgacggaccccttaccgtactaaataataaatatcatgttgagaggtgtatttttaaaaagcccactcacgaaaacgagtgggtttacaaaagctctaactaacccgcaaaggttttagtcagagctatttattttttgatccaactcactaagcgcctactctgtcatcagctcgataatattcattggaacgtgataaatcccctttttcataaaaataatcagctactctgattgcaaagttttcaatgtctccgtacattcttaggaggaagataccattagcgatgacgctaatggcgccctttgtttctactcagtaacttattcagcttctcccacaactgtaaagcgttcatttatatgttttggattttctatttcatccaatactgcaattgcatagtctgcatagctgatataactttcgcctttcgagttcacaagaagatgatcttttcctgactgataaaacccagttcttttcccgtctgggtcaaataccgctgaaggactgataaatgtccagtttatatcagaagtttcctttagctcttgcaagttacgaccttgccctttagctgttggaataaaaatctccgggaaatcaggtgtatccattacactgacagttttattttcgtctacataaagactccctgctccgcctacaattactgctcttgtacctattccttttaatgccctaattaatgcccggccagcatctacatgtgcctgttcttctcctaatggagctccgaaggcattaactattacatctaacttttttagatcatccgatgtaagatcaattatatttttttcaatgattgaaaccttttcctctttaagttttgcagcatctcttacaattgcagttacctcatggcccctgcttaccgcttctttcaagataagacttccagcttttccggttgcaccaatgattccaattttcaatttaaagtcctcctaatcattcaaaattttaaatgtaaccaaattgattacatgtaataattttagttacaccttatttgtttgtcaatacttttatcaccttgttaattgagcatattagagtgaaataaacttgtaatacattcagttacaagtgtactataaagagtgtaaagtaattaggatggtgaagaaatcatgtctattagcagccgttttgctgtaggaattcatatattggctcttattgaaataaatgaagacggaattagcacttctgaatttttagctggaagtgtaaatacaaatcccgccttaataagaaaaattatggggatgctgaaaaaagcaggtttagtaaatgtacggccaggtattgcaggagctgaattagcgaaggatttaactgaaatcaccttacttgatgtttatagagcagttaatgttgttcaagataaagaattgtttagtatacatgaaaatcccaatcctcaatgtcctgtaggccggaacatacaaagtacaattggtccaatatttgaaatcgcccaatctgccttggaaaaagctcttggacatataacaattgaggatgtggtaaaggatattatcgaaaaagaaaaaacggccgataattgttaaatgattcacagaaaatcttttatcagactggggataagaaaaatcaataaaacaaaaagggactggatcatattgaatccagccccgaattgatattgattttagatttagattacggtaagggatataaaaatgctcatgataaagagaaaaaattaacgacaatgcacacgatgccagattctttaatagggcgtgagtattactatccaacaactcaaggttcagaagctaagttcaaacaaagacttgaggaaatctcggattggtataaaagaaaccgcaaatcttagtttgaacgaatatgttctgtatataaaaataatgaggtatggagtgaattgataatgaattatgatgaaataaaagattactgcctaacctttccaaactcttatgaagaccacccttttggagatggttggactgcaattcggcacaaagggaataagaaaatatttgcacttatcttcactcgcgacgaacacttatgtgtcaaccttaaatgcgaacctgaaagggctgattttctgcgtggtctttttgaagaaatcaagcccggataccatatgaacaaggagcattggaatacgcttaccttagatgagggactcccagagcatcaaatccatgacatggtaaagtacagctttgaactgacaaaaccaaaaagtaaaaaggaaacataacatcgaaggatagaacgctcattatagatattcatccggtgcaatgatacagaggaatatgcaaaaaacctcaaggtagcaatttttaaattcgtatttacgagatgattttttcgttattgtgagtcctttgtttctcgacataggttgaacaaataaaaaaagagcagactcaaaatccactcaattaattaagatgattgctcatttcatccagacacctataaaaaatgaaaggtgacgatgatatgccgcaaaggtcatttagcgtttaattaatactgataactcaccttcaaacactttttcctctttctgattataggtagataacaatacagtaagtatccccgtctggcttttatttggttttttatcaataaccttaacaatagtgttcagtttatcattagggtaaacgggtgctaggaattttatattattcattcctgtcccagcaataatatcgtcttcatgacacccttcttcaatccaaagcttaaaagtaatagataacgtttgtattccagaagcaataattccattaaacctgcccatttttgctttttcttcatttaaatgcatgtactgtggatcatacacttctgcaaaattcattatattctcttttgttaattcaaaagatttagtttgaaaaacctgcccgatggtaaattcatccaacttcataaataaatctccttgaatctaaactttattattaaatctacgtagcattttaacatactggctctcacacaacaacttaacggtaaaacaattgttcccctatcaggaatgaacaagcacattgtttttgtttccttgcctttaacctctttataatcaggtgttttcttataaagaccaaggcggtcgccatcaccatcacccggcatatgtgccatttcctcataagaatctccaagcttctcataataagaataagcagtcagcctacgagaactttcttctggctgataaaacgctgaatatacttgccgtcatcatatacagaaattatggcgttatctcttttgtactcatctgaatctgctcgcatttcttttctgactttcttctcctgcttcatcacttcattaattgcattatcatatttactaccgccgcacgcagtcagcagaaggatgaaggtgactgacaaatcatacgacctactataagtaagtggacagtaacagatgaatttttataaacaaaaaataccaagggtgtcaaaacccttggtatcatagggatcggccgagaggacttgaacctccgcaggttattcacccgcttggcccgccatctatattcataaaactattgctcagttgtcagcatgtgaagtaaattacgaatttccttgttataacttttaatttcttcttcattacaaccggttttatcaaatactgcattaggtatcattgtgactttttctttaaactcattcccttcagttgttaacgtaataattacacttcgttcatcctcttttgaacgctctcttataataagacctcgctcctcaagtcgttttaaaactggagttaatgttccggagtccagatataattcttcgcctaaacctttaacagatattttttccttctcccataaaacaagaagaaccaagtactgtggatacgtaattcctaattcttttaagagaggatggtataactttatcatttcacgggaagctgcataaatcgcaaaacatagatgattacttaacagtaatttatcattcttcatgttaaattcctcacaatatttatattcattactacacataatagcataagaattacattaagggaaattgaatgactgacaatttaattaaccataacttatatacatggaaactttatttataaccaaaatgtgtttgaggtgcattcttattatgaccgatatagatacttccactatattgtttagaccgactcatagatttattgagccaccttctcaatatggttattatgtacactaactttaaactgcggaaaactgttctttattttagtctaatcattcatttagagaattttaattgcgaatttaaattgagagcaatttaatttcaaaaaatttaattgacaacgctgattagattgattaaaattcaattgtgttaaatttaatttataggagtgtttgatgatgacagtatattttacagcagaagctacaacaaaaggcggaagagaaggtcatgtaacatctaatgatcttattattgatttggatttagctatgccaaaaccaaatcaagtatccgcggctacaaatccagaacaattatttgcggcaggctattcagcttgttatgacagtgctcttcatttagcagcccagagacaacgattaaaaatcgaatcagctgttaccggtaaagtaagtttattaaaagatgaaagtgataatggttataaaatcggagttgttctggaggtggaaattcaaggggtatctcaagagcaagcggaagaattaacacatgcagctcatcaagtatgtccatattctaaagctactcgcggaaatattgatgtacaaatcattacaacagcaatgtaagacgaaagatgccaagatcaataggtaatagaataaaaaaatttgattaaaacatataggtgaccagccttcaaataaggagtgagattgatgttaaagaaagtacaattagaaaaagcagctcaagaatttgcagaagcaaccgcgaacccaccctatctattcgaccttggacctgagaaaggacgagaagctgtagatgaggttcaatctgccccaattgataaactgccagttgatattgaagatgttatgatttcaggaggaccgagcggacaggtatcagtaagaataatgcgcccgcagaatgcgcctgcgcaccttcctgtcatcgtgtacattcatggggccggctgggtatttggtaatgagcatacacatgatcggctcatccgtgagctagcagtcggagcacaagctgctattgtctttccaaattacaccttatctccagaagcaaaatatccgacagccattgaagaaatctatgcagtagtgaagtgggcatctgaaaatggccgtgagaacggcatgattcccgagagtctaacaattgcaggtgatagtgttggaggcaatatggctgctgctgtcacgctaatggccaaagcacgaggtgacttgaatatccggcaacaattacttttctatccggtaacagacgcttctttcgatacggaatcctatcaccagtttgctgcaggatactttttacgcaaggacgcgatgatgtggttttgggatcagtacacaaccaattcgaacgagcgtgctgaaattacagcatcacctctgcgtgcaactgctgagcagcttcaagggcttccatctgcattgattatcacagctgaagctgatgtacttcgtgacgagggagaagcatatgccaataaacttcgtgaagctggtgtttcggtcactgccgtacgtttccaagctatcattcacgatttcgtgatgctcaacgccttagctaaaactgaagctgcgcgcggagcaattgatctcgccgcaacctggctgcgtaaagggttttaatccatttattgtttcgtcacatagagactgctgcaaataaataaaaaacaaacagatccactcaaataattgagtggatcgtatattggaataatggaacttttgatgagctttttaatcgggctggttattattttgttgttgagatgtccctaattgaaaagctaactccacaacaaactccgttttttcaccagttcaccctcttcatatccaaaaaacctttgttgattagttagcgtacaagttctcgttttctgctttggaccccatacagaaaataaaaagccagctctccttcgggagaagaactggcataacaaagcttcttgcttcttattttgctgtattgcccggaccttttaatttctcttcgttcttgcgtcaatgttttattattaggacacaaccaataaaataatgacgatcgagaatagcaacgctgcatttgcaaagcagtaagccctccagaatataaaagagctgcagtcattgctgctcggataatcccagcttattctgagtctgtatttcgagtagtcggtcaattaaatggatgtttttttcattccttttctgtttgttccattttccaccacagtgaatcttttggattttcaacagcttcttgaaactcagctttagaagcaactgttgggtaagaaccttttaaagatttacctgaagtatctttaaataaggttaacacaactattaagccaattaaactgactgccaataaatagaaacccggcgccaaattgtttcttgtcacatgggttaaccaagaagcaactaaaggtgttgttccgccaaaaatagaaactgataagttgaatgtccaggataatgtacgatatctaatgtcagtatggaacaacgtaggtaaagatcctggcatagtaccttcgtatacagataatacaatacctaacattaaaagtcctataaataagaatgttatattccccatattaagaaattgaaaagagataattgaaaatacaattcctaatactaatccaattgttataacttttttatttcctaatttatctcccagtttaccaaaagttaaagcgaacggtaccataataatcaatacaattgctgtaaccggtgtacttatattatcacttataccaaggttctcatctaaataagaaggcatataccctaataataggtaattggttatattgaaaaatgccacaaatacgatacataaaaagatatcttttttatatgttttaatgacttctaataaacctggttgttgttcttggttttcagagatgtcactttcaaagattggtgattcatctagatgacttctcaaatataaaccaaataatcctattggaatacttaagaagaaaggaattctccatccccaactattcatttgaacatcagataaagtccagaaaagtactgtaactaaaacagaagctactatataaccagataatgtgccgatttctaaaccgctgcctaaccttatacgtttattatctggagaagattctgcgatatataccattgccccagcgtactctccacccacagaaaagccttgcagaatacgggcaaagagtaataatataggggcccataccccaatctgatcataggtaggaagcacaccaattattaaagtagataaagccatcattaaaatagtaattgttaatactattttccgaccaaatttatcacccattttaccaaaaataattccgcctaccggtctaagtaagaaggcaattgcaaatgtagcaaaagtaaatattaactttaattcatcgttttgaactggactgaaaaagtttttactaataataactgccaaataagaatataaagcaaaatcaaaccattccatcgcgtttcctatccctgtagcaaacacgcttttcttcgctttttgaatgtctacaacgttaatttttttcttgttaaacttcatttaataatatcgactccttaattatcaaatccacattatacaagcgcgtaaacggtccgagcatgcagtcccagaatgtatagcgtaatgcttctctaaaagtccgggggtttctgtttcacctgatggagagctaacggcatagtggctgattggttcaactgtaccttaaaagactagactaatatccatatcagcgccaaataacattgtaaaccaggaaagaaggatgaaattaagtgttttcgctggtttccttaacttatttttgccgattgggctaaaaataatacaagaagcaacaaaaagagaaacagccaacagataataccagcctaagcggttagtgagatatccttgggttgtggttggtattttctgcagacgatttggagaaatgattccccttcatacagctctattgtgaatatgatcacaatcgaaaaaaaacttttatttcttcaaagtagcctaaacctttattttagatcttccattacgtcttccaatatgtttattataagattgaggtcgttcctaagaattatttactgattctatctttattaccccacaatcaggtgaaacaaaacactataaacgtagcatacctttttaaaacctgacaagcccaacggggtgatagaaaccaggctaaagccaagctagtcaatggatagaagaaatttttttgtttttcccaaggaataaccgtctgcgtttaatctagcccaattagaaagaaaaagagcaggagtaatcctgctctttcattcaaaactttaatttgtatgacgaatttcgtataccttttcaactttctttaccttagactacaacagaaataagtagcacagggtatgaaataatggttttatttaaacagtcaatcaccgacaattgaatttattgcatgacacctgacaaaatttttttatccagctggaaataaagtaacattttttaaggtaatggatttatttttgttcaatgattaaatgatccccaatgacaataaagactaataattactaaaatttcaggaaaccccaatattgcttatcttaattattgtttaactaattggtaattgcaacagtaaacttatacttatggaaagttataccaaccgaaaattttccgactcaagtctgtttaaccagttgtgaaccaatgaattaaatacatcggtttgttcgatttgcaggttgtgaccagccatatcaagtactgcaaaagttgcccttgggtaatcttcgagtagccgccacgcatcatggtatccgactacattgtcctgacgccctgtgataattagcgtgggataatcaagtttagatgaaatatcgaaggtaaacccatatccattttgacgaatgttgtttacgaattcataatttgtttgtttagatggaagtaaaatttcatcccgaaacctctcccattcagttttaccttgcacaatccccatagagcaaaattcattcgcctcctctgaagacaaatgtgatatcaagtcgctgtctctttttagaacagtcttctgcggtactaccctttcatcgaattcgggtatagttaatggtgccatcagcagtaatccacgaactgtttccttacgtgaacgaacgatacctctggcaatgtaccctccatatgaattaccgcaaacaataaactgttgatcaggaataatctcgtccaaaagacgcaatatcgcttctaaaacatcatcagagttctgaatagatggttgtggcttagaatgtcccatacctggtaagtctatgtatattctcttccaaccgcttcgtttctcgaataacggttccattgcatttaacatcacctgatggtcaagtgtccaaccatgcaacataacgatcggatatccatctccaattactttatggtaaatcgacatgtagttgttccccttccctgtaatcctaatgtttcgacatgaacatttaatcctttcatacatttatcacaattttaacaaacttttaactgaacttggtaagttgaacaagggttatacattgaatttcgacaatcgcaaactgtcatatgtgtccgtcatatcaaaagaatctgtttaatgtgttgtttagtgctttcgttactgcgactatcgacaaataagaaccaagcaaagtattgtccagatactttgagtattttgatcactttgaactttaggtaagtgggcagtttgtgggcagtagatcatttaaaaataagcgcaaaaaaataccaaggatctctctattacccttggtatcattgggatgcggcgagaggacttgaaccttcacgggttattcacccgctgggccctcaacctagtaaaaacctatcatgagtttcaaaagcttttattcaaagcatctgtttattttatttatacttattttcatcatttttcatgaattccgagcacaaactgggcacctattagagaccaaggaaatctacatttcaacaagaaatatctactcatcgccctgctgtaattagtttatttcagcttccctcgcgaataccggatcaatgctcagctttaagatagtcaaccaatttctccgcactgttcttaacatcttcttttgaaaggtgaagtgtaccatattgtgcaaaggcaggaagaaaacgcattcctatatagttagcagtgatttgaaacggtctgataagctcgctgatcgtgatattatattctccgcctgcttgataatcagattcctgtgcgcctaaggagatagctaagagtagttctttgccatgcaatttagtacctccagttccataagcccaaccatgtgttaacacatcatcttcccattgtttgagtaacgcgggactgctgtaccaatacattgggaactgaaaaacgatgcgctcatgatctaacaggagctgctgctctttttctacatcaatgataaaattaggatattcaccgtacaggtcatgaaccgtaatgtcattctcttgctttaaacgattcatccaggttttgttgacaacagacgtttccaaattagggtgtataacgataactaatgttttcatttgactgattatcctttcttcgccgattagttattattgcttttacgataatgaattgaattaattttaaaatatcaactttatttacacctattttatcctttttcgtgaattcagggcaaataattgggcaccgattacatttatagccaaaaaaagacttaaccttttaaaaaagattaagccttttcagtacctttatgcccctaccctattatctcgtgtctaaattctaatagctgataatataacaaggcctctttgttttcctccatgcttagcaatactttctctgccttttgcaaattggagtttgaggcattagtaactacctataatgatgaaaatatttgtgcgacgtcaactgtagatgacttactccaggtaagtgggcagtttgtggatagtagatcatttaaaaataagcacaaaaaataccaaaggcggttaaacccttggtattattgggatgcggccgagaggacttgaacctccacgggttattcacccactaggccctcaacctagcgcgtctgccattccgccacgaccgcgtgctatgaagctgtctttccactaagcatataagctagtgatgatgatcagcactttgaaaagaaagtgcgggtgaagggactcgaacccccacgtcgtaagacactagatcctaagtctagcgcgtctgccaattccgccacacccgcgtgacaagtggtgagccatgaaggactcgaaccttcgaccctctgattaaaagtcagatgctctaccaactgagctaatggctcgctctaaaagtgattcaaaatttttaaataaaatggctgggctagctggattcgaaccaacgcatgacggagtcaaagtccgttgccttaccgcttggctatagcccaacgaaggtaaatggtgacccgtacgggattcgaacccgtgttaccgccgtgaaagggcggtgtcttaaccgcttgaccaacgggccgtctggttgagaacttatctggcggagaaggagggatttgaaccctcgcgccgcttacgcgacctacacccttagcaggggcgcctcttcagccacttgagtacttctccataatggctccacaggcaggattcgaacctgcgaccgatcggttaacagccgatagctctaccactgagctactgtggaatgatcagactttctttattataaatgatgcgacatattgtgtcaataagcaacatttattttttttgagaaagcatcgttgtctctcaacgacttttataatttaacacagatcattgaaatgagtcaagcctttttaaaaaattcttttgatttttcctctgcactttccgcaggcatatctttccgggttcattgcccgcttctttatatactgttggccgcaggcctcgcatctatacatatatgttttcttttgtgtctttttggtttgcagcggcgtgcagaatcttggcgctccgactttctgaagcaggtctctgaaatccttgtctctgtgcttgtacccttttccctcaagatgaagatgataatggcacagctcgtgcttgatgatgcctaccagctcgctccgtccgtgttcgagcagatattttcggtttaattcgatgttatgggaagacagcatgtaccggccgcctgtcgttttcagccggtcattgaaaaaggcccggtgacggaacggctttccgaaatcctgtgcagagatgtcttccgtcagcttttgaagttgttcgttatccatatgtgcaccccgctttaaaaacattgaacgggacaattcaccgttcgcatacaatgtgttaaaaccgacctctaactaaaagctgaggaggaatgagccatgccgaattggctgatgaaacaaatgcaaaaagcgtttttagaaaaggacaattaccaaatcaaactgctgaaccagtgctggtatttctacagaaaaaaacactgctcgtaagcagtgcttttattttaccatagacagcgacactctgcctttttgcacgtccaccccttcgacccatacggtgacgatgtctccgaccgatacgacgtcgagaggatgtttgacgaattgattgctcagttttgagatgtgcacaagcccgtcctgcttgacgccgatatcgacgaaagcgccgaagtccacaacgttccggacggtgccctgcaattccattccttcctttaaatcctcaagctgcagaacgtcttttttcagcaaaggcttcggcacttcgtcacggggatctcgctccggccttgtcagctgcccgcaaatatccgcaagcgtaatctcccctataccgagctcctcagccgtttcagacagcggcagtgcgctgattttctcttttacgtccgcgcttccgatctgatccgcagtgagctgcagttttttgagcagcgcctttgtctctttatagctttccgggtgtatcccggtgcggtcgagcggctcccgtcctccgggcactctcaaaaagccgatgcactgttcatatgtttttgcgccgagacgcgggatatctttcagctctttgcggtttgtaaattttccgagctcttccctttttttgacgatattgccggcaacggttttggataacccggctacatattgaagcagcgcggctgatgctgtattgacattcaccccgacttggttgacgacggtctctacgacaaaacggagagattcgtttaaatgcttttggctgacatcatgctggtattgcccgacaccgacggatttaggatcaattttcacaagctcggccagcggatcctgcaacctccgcgcgatggagacggcgctgcgctcttcgacctgaaaatccggaaattcctcacgggcgatttctgacgcggaatacacgcttgctccggcctcattgacgatgacataataaatgtcccgctctgtttctttcagcacatcaacgacgaattgctctgtctcccgtgatgccgtgccgtttccgatcgccacaacctcgacttcgtaccgatccagcaattctttgattttttttcgggcttccgctgtctttttgacgggagcgtgcgggtaaatgacatcgattttcagcacttttcccgtctcatcaacgactgccagtttgcaccccgtgcggaaggccggatcgacgccgagcacgacttttcccttcatcggcggctgcagcaggagcttacgcaggttttcagcgaaaatatggatcgcctgcgcgtctgctttttctgacagttctttgcggatatcgcgttcaatagccggctggatcaggcgtttataactgtcctcaatggcttctttcagcgtttctttcacaggtgtttcacggtgtttgatgatttgcttttctaaataagcttttatctgatcggcgggcggttcgatcgcaatctttaaaatgccttctttttcaccgcggttcatcgcaagcactctgtgaggaacgaccttttggatcggctcttcgtactcgtagtacatctcatagacgtttttctcgtcatctgcggctgacttgcctgccgcggaagtgagaattccttttttatacgtttcctggcggatccactttctgaaatgaggatcatccgagatttgttcggctatgatgtgcttcgcgccttcaatggcttcctctcttgaagcgacttctttttctgcactgatatattgatcagcgacgtcgtgaaggcggttttctttcgggagagaaagaatatagtccgcaagcggttcaaggcctttgcttttggcgacggtggcttttgttttccgtttttgtttgaagggcggtataaatcctcgacttcctgaagcttgaccgcttgctcgattttttgcttcagcccgtctgtcagcttgtcctgctcggagatcaatctgatgacttcttctttccgctgcgtcaggttttgtatgtattgccaccgctcggagattgcctgaatctgcacctcgtccattgagccggtctgctcttttcggtaccgcgcaataaacgggacggtattgccgtcttccagcaggcggatgacactttcgacatgtttttgggataacgctgtttcttcagcaatttgttttttcaaaagggctaacgtttccatatcacaaaagcctccatctcttctttctttctctagtgtatcaaaaaacggcggaacataaaaaaagcagccttacgataaaagctgcccgagaatataggtcaaatcatcacgtctggatgttgtgtacggatgaagtgattttgatatttcttctattgagtgtccctgctttaagcaggtgcggatatgcggaacctcaagcccatccgtgtagatgatgaatgtcgcccctttttcgtatgatgacgtatacgttttgtatctttgcggtttgcctgagaggtaacccgaaatcggcagcggatgaaaaacttcgcctgatggggagtgcaggaagaaacggacgttgccgatcgagcagtatgtcaattcccttttgatgaaattgatttttaagatggaggcagtcgcccctcttttgtttttcatcgcttgattgcagcgctcaatgatgctttccacatcctcatccgcatacgtttccacgatgtctttaatggctgacgaggattcattggcaagagatccgctgccgagaccgtccgctaccgcgcaaactaattcttcttcattcgccttcataaaaaagctgtcgccgcatatggacttgccttctttatttaattggtatacaagagtttgaacatgttcattttcttcaacctgaatcattacattagctccatggagggatctccaatcaaggcctctctcagttttttcaccgctttccgctgcaggcgcgagacgtgcatttgagatattccgagaatgtcccctgtttctttttggcttttattttgcacaaatgttagatcgataatctgtttttcgcggtcggacagcacatgaagcacgcttttgatcatcatctgctggttgacgcgttcgtatccttcctcctgcgacccgacgatatctaaaattgtgacggtgcttccgtccgcatccgcttcgatgctgtgatcgacagaaagcgcctgatagctttttcccatctccatcgtttcaagcacttcctcttctgacacatcgagaaaggctgcgatttcttcgactttcggcgaccgctgcgtctctgtcgtcagctgatccaccgccattttaatgcgcggcccgagttctttaatccgtctcgggacgtgtacgctccatgttttatctctgaggaagcgtttgatctcgccgatgatggtcggaatcgcaaatgcttcaaaggatttgccgacctcgggatcataccgtttaatggctccgagaagtccgatcatcccgacttggcggagatcttcgtgaaagctttttccttttgaatatttctttgccagcatttcgacgagattggtatacacctcgacgagtgtttcctgggcttctttattatcatgtgtttgaaagtcgcgtatgagccgatcaacttcatctttagttagtttcgtagtttttgatggttgtgccatgatcaactcgctccccatttaaatactttgtcatcgccacggttacgccagagttgctttgaactttgacttcatccatgagcgtttccattaaatacagaccgagccctccttctgacaattgatcgactgtgtgcgaaggtgtgtacggcccgagatcctgctgcttctgatcaaaatcaaagctgtctccctgatcggcgacaatgacctccagccgatcctcaaacacaccgaaccgcacggatacttctcccttattttcatctttgtatgcatgctggacagcgtttgtacaagcttcgctgacagcgatttttaaatcttcaatgtcatcataggtatagcccattctgctggcgactcctgataatgtaagcctgacgattcctacatattccggttcggccggaattttcatctctatataatcaactgatgtactcattgcacgccaccttctgactttgccgaaatgtcgatgatgtccttaagccccgtaatttcaaacagacggacgagccggtcggaaagattctcaagcttcagagagccgccttccttgctcaccgttttaaacacgcctacaaaaacacctaaacccgtactgtccatatagtttacatcttttaagcagattctcatgtccttcccctcgtttgccaggggcatcagcttttcacgaaccaccggagctgagtatacatcgatttctccagcgatattgatttgtatatctgaaagattctccttcatatctaccgttaaattcatcgtatcacctctgaaagttatccttactcgtgctaatggctttttacccgtgctgccgtttttttaaacctttcttttcaaaacaattaacgtaaaatcatcatgaagctgaaagtcctgaagtctcagcaggctgtcgtaaatatttttgaccatatcctgcgcggagcagtccatatgttcttccagcatgcgctgaatgtcgctgcgttctaagaaaccgttttcggtacggcattcggtgacgccgtcagaaaaaagaacgatcatgtctccttcgtccatgtgctgttcatattggctgtaatcaaaatcctgggaaattcccagcaccaatccttttgcctccagatcataaaactttttttctttttcagagtagtagaagcccggttcatgccccgcagaagcatatgtaaattggtgatttttcgtattgtagtttgcgtaaaacatggtgataaacatgcttgagtccacgttctgttctacaacgcggttaagatttttcagcacttgggaggggtgaatgccgatctccggaagagagtccatggcatacttgatcatcgacatgcacaatgcggcgggtattccttttccgatgacatcggctatcgcgatgttaatcgattccttgtctttgacaaagtgataatagtccccgctcatttgcttggcggggacgctgatcgccccgatatccagttcttcttcttcaggaatttttgtgcccagcagcgtctgctgaacatttgcggcaatttcaatttctgaacgaagctcctgctggatatctctcagactttggtgttcctgataagccatcccgtagccaatcatgacttctattaaaaaatccagcgaatgaaaaacatcttccggcagatccggatacagttcctttaccacttttcggtggatgctgatgatctcctccggaggaacctgatgttcaatcgtttttcggctgaatttttgggcttgatataaagatgtttctgttaattcggctatatatcggctaagcagctgatgataccgctgctctataacctccctgaaatccacgttctaacctcctaccgaagccattttacggcttgaatctctgttccttcctctgcaacagattgcaggctgaattcgtccatcagccttttcacgcccggaagtcccgctcccagtccgcctgacgttgaaaagccgtcttccatcactttacggatgtcggggattccgggtcctttgtcttctgctataattttaaggccttttttccctctgtcgtttacttgttctatgctgacctggcccttgcctgcatataagtaaatgtttctggccaattctgagatagccgtcgtgattctggcctggtccaccgtgccgaagcctaattccttcgcaacgttgcggccaagctgtctggcggctacgatatcccattctgtcatgattttcacacaggattggtcgttcatcgctattcccccaattcccgcttcaatgtctcaagcccttgctctaaatcgagcgccgtttcaatttcctcaagtgagattccgagttcaatcaatgtgaccgccacagccggctgaattcccgtcaatacgacctttgcgcccatcaatttagacatggtgatgacatcgccgagcactttcgcgataaatgaatcaatcatgtcaacggatgtcaggtcaatgacgaccccgtttgcgccggtttcatagattttgttcagcagatcttcttgaaaatgcaaagctgtctggtcgtcaagctcccattggatggataccaataagcagttatacagtttcaggatcgggatttttggatgtctcacaatgttattcccccaatgaaacgatttttcgatttgtcatttcaagcgctgtttgaattcctttttgaagggtattcttcgtaataacctgcgacaaatcaattcccagattaacgatcgtctgcgcgatttccggacggattccgacgagcagacatttcgcgccgacaagccgcaccgcttctgatgcctgaataatatggtgcgccaccatcgtatcaacgaccggcacgcccgtgatatcaattaatacaacctgtgaacggtgctttacgacgccgtttaacagattttccataatatgctttgcacgctccgtatcaatcgtcccgacaagcggcatgaccgttacatgctcaaataccgggatcagcggagccgacaattcctgaagcgcgattttttgcaaagtaaccgttttttcccaggagatagaatactgatttaagatttccgtgttgatcggattgaaaaagctgtctatttccaaaatcaaatctgctctgtcctgatcggccatattaaggtcgaccatcgtttcgtaaagcagtttccaaaactctgacagggtggctgaaagaagtttcagcgacaggccgagctgaacggcgcgcagtgcgagttcactgatctgctcttcggcagcctcgtcattttttgtcgataataaaagaatgtctatataatctttacaaatattttcacatatgtgattcgtaagctgatagtcttcctgattgcctacttcttttagtttggctgtccaagtatcaagcagttcatcatgctgatcaataatgaactgatacactttctgattcgacatgggtttcactgacctcccgacacaaaacaacaaattttgtttgattatttctttattatagcgcttatgtttttcgaaaacaaaaaaagttgctctatatgagcaaccaaaatatgactaaaaatcaatgagtgccaaactgatttgcagggcttcatcaaccttatccatcatttcatcatccagatgagttattttatccgttaatctttgcttgtcaatcgtccgaatttgctccagcaaaataacggaatctctttcaaaaccgtagcgttttgcatcaatttcgacgtgggttggtaatttcgctttctgtatttgggctgttatggctgcaacaatagcagtcgggctaaagcgatttccgatatcattctggatcactaaaaccgggcgtacgccgccttgctctgagccaacaacaggagataaatcagcaaaataaacatcgccgcgctttacaatcaaaatgattatcctccgctgactaagcgctcaacggtcgtttctgcttcgcactcagcatagtgagcctcagaagagatattcaagttgattttcgccatttccatatacccgcgtctcatcaaatcacggttatggcgagttgtccgttcgctgacatacgctctcactgcttgtgatatcagttcgtttctgcttcgtttctcccgcatcgctacaccatccaattcagctactaagttttcgggcaagctgattttcatttcggttcttgcgctggattcagacaaaaaacatacacctccaccaaacttacggatacgaccaattcatccatccagacataatgataccattattcaaacgtcaagcaaagctgttttataaattctctttttccggatgacggctacttgtttgtattatcttgcagtaaaggatttcttacttccattatactctcattttccaaaaacatacggggaacgcgggaactaatggtacaagggacctcgtaattaatcgtctcaagccgccctgcgatttcatccatcgtgatcgtttcttccttctggctgccgatcagggtgactttggtgcccggcggataagattgatctaattcgaccatcaattgatccatgcagattcttcccgcgatgttcatccgtttgccgccgatcagcacagacgtgccgctcagcttgcggagccacccgtctgcatagccgatgggaaccgttccgatccattgatccttctctgccgtatatgttgcgccgtagctgacgctttcccctttgcggatctttttcacatgggataacacagagtgcagcgcaaaagccggctttaattgaaacggaatttcgctttggatgtcagcagaaggacgaagcccgtacatactgatgccgaaacgaaccgcgttaaagaagccttttttaaggcgaagtccggcggcgctgttcgcgcagtgcaccatcaattcttttaaagggagcggagcgatcaatgttttaaagcggtcaaactggaagaggaaataatctctgtttttctcatccgcggtagcaaagtgggtgaaaacgcctttacagactaaaccgggattttggctgaggatttttaacacgctttggatttcttcctccgttttgactccgagtctgttcatgccggtatcgactttcagatgaaacggcaatgtggcacctccgaggtggcgcgcagcttcctgaagccattcaacagaatatcccgtgagtgttacgtcatattcggcagctgcttgtacatattcgggcggcacggcgccaagcacaagaatcggcgctgtaatgccccgttttctcaatgaaatcgcttcatccagtatggctacggcaagacaagaggcacccgcttcaagcgcggctttcccaacttccaaatctccgtggccgtaagcgttcgcctttacaaccgccatgagatggacgttttgcccgatgtgttttttcatatgcgtgacattttctttaatcgcggacaggttgatttccgcccacgtttctctgtaaaaggatgctgtgttcattcgatacacttcctagcattattttcaattcatattgttattatcatactaaaattattctgcaaagtgaaatggaatcaaaaaagagaccgacagcggcggcctcttttttgacattattttgacgactgtccctgcatgcttttggcggcggccaccatttcatcctttgtcagatcctgtgatgacagaagataatccactccgtcatatgtccacgttaaagacgtatcagataatgcggccaccgtgaagccgagattaaccggttcgcctttcagcgtgacggcagaggcggcttttgcgatatgggctttttcttgaataagggtgaaggatttttctccgccgtaagtcatgacgatccgtttgccgtccgccgttgaaatatctttctcttcaagctttttgacgccggccggcacttgaagcggtgttttgaccgcaaatgaatcagacggcttggcgcttgtggcgacgtccatctgggaaagcgtcatatttttcttctcgtcaaaagagtctttatcaaacggcttgttgaattcaaagcttttgaattcgacttttaccatcactttccggtctgtatccatgactttgacgagcgaagggctcatgtcctttttgttgaaagtgatttcctgagtcggcagcattttgttgtgctgatagtttgtttttgtttcaaacgtgtactttttatctttggcggaatagacggcgtctttgtcatgctgcacgtcctttacaagtgactcaaacaaatatacttggctgctgttattcggccagtcgctttggaacctgaagctcttatttaaagacggcgtaaggacaaagactccgttggcgttccgtaaaatgacttggttttggtcttttttcggattttccagatagacccggtacagggaaggttttttatgccagatttccacattgtatacttgcggatcactccccgtctgaatggtcattttggctttcgctttgtacgaggtgtattctttcgccttcttatctaaaccgttcacgatatcttcctgtgatttttggccgcaggccgaaagaataaggacggcaagcagtcccgttaaaagcaaaacaaagctttttctcaccttttttcaaccccttcttctcaattgatgtaaagggaagaaatcgcttgtttgactttaacggtacgccctgaacggacggacgcgtaccataaaagcctcaaacaacttgtctcccttaatgcactatcaaatatatgaaggggtttcggctaatatgcagactagcgtgacaacctttcaatcacgacctgtgccgcggcgtattcttttgtatgggtaatggagacgtgaaccgccgcgccgtccagcttggcgcaggtcagcaccggcttgcccgccgtgtcgtttccggtttcgatatcctgaaagctgagctctttgccgatacccgttccgtatgctttcgaaaaggcttcttttgccgcaaatcttcccgcgagaaattcaattttccttttgtccgacagcaatgtaaaacgggcgtattcagcctccgtcaatattctttgcggaaacctcgcctgccggctgagcatgttttcaattctgtgcagttcaacgatgtcgattccgattccgaaaatcatgtgaattcctcctaaaagtccgtactaaaaaacggtttatgtcataaacgtgttactatatatgtaacaaatcagatgcaaaggggcttgcgatgtttatacgtacggaaaatttccagacttttatcagacgttatccggccgtcagctgtatcttggcgctgcaggcgttcttgtggctgtttttcagtatgccgcttcattccgtcatgatgtggtcagatgcagtgaccggctataattacggcgtttcctcgggagaatggtggcggctggtgacaccgatgtttttacatgcgaatttcactcaccttttgtttaactccatgtctctctttttattcgcgcccccgctggagcagatgctcggaaaagtccgttttttgattgtgtacatcgcatcgggcattatcggcaatatcggcacatatcttgccgaaccgcttgattatgtgcatgtcggcgcatccggcgcgattttcggacttttcggcgtgtatgtgtttctgactgttttccgcaaggagctgatcggccgggaccagtcgaaaatgattatgaccctgcttatcatcgcggtactgtcgacgtttatcaattctaatattaacattatggcgcatttgttcggactggcaggcggatttttgctttcctttttatgcgtgcagcaaaaaaagcggcggtattaaccgtccgctttttcatatgaataccagcgcccgatgcgttcggcatcttcctcgctgacatccttcagcatgacatgctccatgtggtgagctgatttcactgcggtagccacagatgcgagccgccttcttttttgcagaaaggagcggctgacttcaaacatctgcattcttcttctcagcataatcgtggtcgtcttcccgatcagccgtgtggtgagctgcagccggcctccgtttaagcaccatgacgcgctcttaaatgaggcgtagcccagcaccagttcgacgggaagcacaaggagcgatgcatacccccacggtttaaacagaatacaaagcggaatgatcacgaaaaccgagaagataacggagcggaataaataccggcgcagcgcccttttcggcaaatgattcctattttcttccagtacgtaatccggtgtgaaaccgttcagcatcacaccgagctttgatttgcggatgatcggaaacagaatcgtctgagctccttctttctcattccccgcactgccggcgctgacaatcgcaaccgtcgcgtatccgaataactgcctgatcacattttctttaattttaatggcttggattttacggagcgggatggtcacttgatgtttttcaataattcctctcgtaatgaccaattcgtgttcctttttttctatcttaaagttggcatgcttgatcatcataccggcgatgcttaacagccaggcgatgaacaatcctataaaaatgatcacggcgtatatgccgatgctcgcatgcttgagaaaagaaaacctgtcgtagaaccagtccatcggaagtacttcatcaagctgagaaaagagggcgaataccgctgagatgatgacaccgatccccccggatgttgaggcggccataagcagctcacccacagacaggcggtaaacggattgcacatcttccccgcgcatcggctcctgctccgctgcggtctcccctcgttcttcttgctccgctttttgctgaaaaacagccgctctgatccgttccgcctcttccacagtaatggcggataagacggcctcggcgtttttcccgtcgccggccgtttcgatttgaagcttaacaagcttaaaaagctgctgaacgatgccggcactcgtattcattgattgaatccggtcaatggagatgtatctctttttcgtaaaaaacaagccttcttcaattctgaattctccgtcctcaatccggtatgtaaattttctccactcgatcacacttgccgtaatcagccagataagcaggacagcgagcgcaatgcctccgtaaaagcggatgaagtggttggaattaacaatatagacgagaaaaaatggcagaataatgtttttaatggtttcgataataatatggaataagttcaaaatcacggccgccgggtgcagacgtttcggttcagacatcatcttccgtcacccttgccagacgggaaatggaatccctcagccggtcagcttcctccatatcaagcgccggaatggaatgaacggttgccgccgtagagattttgactgaggccaggcggtaccttctgaggagcgggccttgtgaagtatctacgtgctgcaccctcaccatcggcacaatgacccgtttgactataaaaatgccggattgaatatcaatttcattttcatggacctcatagcgccagatcctgtgcctgattttcggtatggcatagacggatatcactgaaccgatgacccaaatgatgccgaggactccggtgatccaatacggccaatggaagaaatggcttaaaacagctgctgctataacggccagaagacagaaggcggacaggatgatttcctgaagacgccagacttttaagccgcttggactgattcgattttttggctgtgctctcaacatacctacctcccattttttatcatacatacaaatacggctgatttgcaaaaaagattcactttccggcatatcgaaaaaaagcggaccccgaaaaagggtccgcttcctgtgttttagtatgattttttctggcgtctgtcacctgaagaacggcggtcgcttgagcgttttttatcgtaggaagaacggttgttgtttttccctttgccgccgcggtagccgccgccttggccgtctctgcgcttagaagtacgctggtttttatagcgtttgctgaccatcggcgcttcatcagtgaggcgtacaggcgtgctgtccggctcttttgtcgccattttaatggctgcagccacaactgtcactgcatcatgatcttctaacaattccgcagctgccgtcatgtagaagttcaggttgttttcgctgatcgccgtgcgcagacggtcaaccgtcacctgctgctgaccttctaatgcttcgtcaagcgtcggctctttcatgcggtccattttgcgttttgtcgtttgttcgatcgcgcgaagcatgtttttctcacgcggtgtgataaacgtcatcgccatacccgtttttcctgcgcgtcccgttcttccgatacggtgaacgtaactttcaggatcttgaggcacgtcaaagttgtatacgtgggtaacacctgagatatcaagtccgcgggcagcaacgtcagtcgctacaagcacttcgatcgcaccttctttaaacttgcggagcgctaccatacgcttcgcctgcgttaagtcgccgtgaattccttcagccgcatatccgcgaaggttcagcgcttccgtcaattcgtcaacacggcgttttgtacggccgaatacaatcgcaagttccggagactgaatgtcaagaagacgagtcagcgtatcgaattttttgcgctcctgcacttccaagtagaactgctgaatgttggacacagtcatttctttcgcttttacttttacgtgttccggctcagtcatgaaacgctctgcgatccgtttgatcggcgcaggcattgttgctgagaataagagcgtttggtggtcgctcggcacgtttgagagaatggattcaatatcatcaatgaatcccatgttcagcatttcatcagcctcgtccatgacaaccgtgttcacgttgtttaaacggatcgtgcggcggttgatatggtcaagaagacgccccggcgtacctacaatgatatgcgggtttttcttcaatgcgcggatctgacgtccgatatcctgaccgccgtaaataggcagcactttcgcacgcttatcttgtccgattttatataactcttcagatacttgaatggctaattcacgggttggcgcgattacgattgcttgaatattaggagactcggggttcattttttcaacaaggggtataccgaacgcagctgttttacctgtacctgtttgcgcttgtccgatgacatctttatttaaaagtccgagcggaatcgtttgtgcctgaatcggtgttgcttcttcaaatcccatacgattgattgatttcatgagatcagaacttaattggaaatcttgaaacgttatagtcaaattattcaaactccttctgattgctgtttcagtaatgtcgtgatttaccactaaaaactgccctttcatccaaaggacaggatcatacgtatacaaagcccgaattactttacgtttaatcttaccattacactatgtgtttttcaataaggcgagatggtcaggcggccggaagcggcctgaccggattcttcccgcaaacgaggccggaccccgcgccggacgggatttcccagccggcggcctttctttttcatacggacagaattatttcaccctgaattagtttcttcatttttgtatatttttataatgctgatcagtattttttcagttcttctctaataaatctttaacgatttcttcgagcttcatacctctcgatgctttaaacagaaggagatcgccggaagcggccatatcctgtatggcgtgaagcagttcttttttgtcgagataatggctgacgcgcccttcttcaaaatgccggcgcgctccgtctgcgatgaatgcgccgagtgtgccgtaagtaaatacatggtcaatttccgccggattgatcgcagctccgcattcttcgtggaatgctttttcttcatcaccgagttcaagcatatcaccgagcacgagcattttcttccgatagcctttcatcgtttcgattaattcgaccgccgctttcattgacgtcgggctcgcattatacgcgtcgtttacgatcgagatgccgttttccgttttaaccagttccaatctcatccccgtcaccttcaggcggctcagtcccagagcggcattttccggcgtaatgccgaaatagatgccggcggcgtatgcggccatggcattcatcacattatgtctgccgagaaccggaataaagaaagaacgttcgatcccgtcgatattgaagtacgtgccttcttccgcctgttttatttctttcaggcggagatcattgacagcgcctgcgccgtatgtcgttgtccggcaagtgtacgccttttcgcggagcaacggctcatccccgaaataaaacagaacgccgtcttcccgaagtccgtttataatttcaagtttcgcctccgcaattccttctcttgagcctaaatcctgcatgtgggattcgccgatattggtaatgacggcagcttccggttcagcaagacggctcagaaaatcaatttcgcctctcgcgctcattcccatttctaaaacggcgatttctgtatcttcaggcatggcaagcacggtcagcggcaggccgatatggttgttgaaattgccggcggttttgtgaacacggtactgagtgctgagaacggcgtgaagcatgtctttcgttgtcgtttttccgttgctcccggtcaccccgatgacccgtgtgccgagttctttcaaataagctttcgccaatgtctgcagcgcctccagcgtgtcatcgacaaggatgacggcacgctcttccggcggattcggttcagagcggtcccacaacaccgcggaaacgcctttttcgaatgcttgcggcacaaaggtatggccgttaaaatgctcgccttttaaaggaatgaacagctgatttttttccaaagtccgcgtatcggttgcggcgccctcaatcattgtttgttcaaatacaggatttgtcagtgtgcctttgaccatgtcggcgattcgttttacagttcgctttatcaaaggtggcacctcgctttctgaaaatgttgtctgttacgggaaaagacactgccccttcaggcagtgtccgtcttcattaaaatgtatgtttaatcagctgtttttcggcatggcgttcttttgccagctcaaccagctgttcgatcagatcactgtaatctacgcctgcttctttccaaagcagcgggaacatgctgaatggcgtaaagcccggcattgtgttcacttcgttaatgagcacttgaccgtcattggtcaggaagaaatcggcgcggacaaggcctgatccgtcaatcgctttgaaggctttaatcgccatctcgctgatttccgcatattgttcatccgtcacttgcgcgggaatcattaaatccgtgtcgccgtcttcatatttcgctttgtaatcgtaaaagtcggttttcggcgtgatttcaccgacggcggaacatttcggttcgtcatttccgagtacgccgatttcgatttctctgccggcgattccttcttccaccacaattttccggtcatactcaaaagccagttcgaaggctttttcaagctcttcgcgatttcggcatttgctgattccgacgcttgacccgaggttcgccggtttgacgaagcacggatatcccagctcctcttcaacctgctgtaagcagctgtccggcgtctgtttccagtccttttttaagaaagcggcgtacttcgcctgcggaagccccgcttgagcgaacaaatgcttcatgatgactttatccatgccggctgatgatgcaagcactccgttgccgacataaggaacgttcagcaattccagcagtccctgaatggtgccgtcttcaccgttcggtccgtgcagaagcggaaatacgacatcgatctgcgccttttcgtcaggcgacgcttcaggaaacatttcccggttcaatgctgatagagcgaaactttcaccgttttgttccagctgaagcattttcacgttggaaaccggctcagtcagcagcgggcctctttgccattctcctttttcagtgatgtaaatcggatgtatatcaaacttctcagtattaagcgcttttgttacagctaatgctgtctgcagcgatacattgtgttcggctgactttccgccgtacaccaatcctagacttgttttcaatggatattcccccacaacaattcatctttactatcttatcactttcctcagaaaatgatctaattatttttgggcattctgaatatgaaagcatttgtatgtaattcctttttattttatattaaaatggcatggaaaaggagatgtgtcatatgaaaaaaatcagtacaacagaacaatttaatgaacttattcaatccgacaaggaaatcatcgtgaaatttttcgctgattggtgccctgactgcacgcgcatgaatatgttcatcggcgatattttggaagaatataatcaaaatgattggtatgagctgaacagagacgagctccctgagcttgccgacaaatatcaggtaatgggcataccgagccttctgatctttaaaaacggcgaaaagaaagcgcatcttcacagcgcaaacgcgaaaacgcccgaagaagtcacagagtttttatcacagcatatttaattcgtttcacgatctttgtttatgacttcaggctctacatgaacatggacatgagtcacatcatgttcatgttttattgcatattcgacttcatcggctacttcatggccttctttcacagacagtcccggatctaccgtaatgaccatttccacatgaaccgtgctccccaaataccttgctttcacatccttcagcctgctgacctcttttatttctttcactgtgtgtttatacggctccaaatctttcagatcaaacccgtccgttaatgagtgggaagcatctttgaagatgtcccatgccgtcttacagatgataattccgatcagaaaagcaatgaccggatcaatccacggcagatgaagccgggccgttaagacgcctatcaacgccccaatactgacataggcgtcagaacggctgtctttcgccgccgcatgaagcgcagaacttttaacccgatccgcaagacggctgttatatacatacatgccgtacatgacaatcgcgcttcctagcgccgtccatgccgcaatgaagctcggctcggcctccgttccgctgacaatcgcctttgctcctccgatcagcacttcaataccgaccgccatcataataaaagacgcaattaatgaagaaattgtttcagcccgataatgtccgtaggcatgatcactgtccgcggggcgctgggaaatccggagcccgatcagcacagccagtgatgcgacaatatccgtagcattatttaacccgtccgcactgagcgcttcggaatgataaataagaccgatcaccagtttgacggcggcaaggataaggtacgcggcgatattaagaatcgcgcctttttcgccccgttttaagtttgccgtttgatcattcatgtaaggactcctccattctcattcatagtatggatggaaaagcggaaaaatagcagctttgatctgaccaaatgcaatattcgacagcattattccccgggaaactatttgtcgaaaaattggcggtatttttcctttacatatgaatatgtccattgtataatttcattaactgataatgattctcaatatcaattgattaggagggtaatcatgaggtcttctcctcagctcagatcatcagttgaaggacgaaaaaaacatctgatccatttgctgatcaataacggaatatacaaaaagtcggaacggcatttatatgaattatcgctcggagaattagaaagcgaatacaaatatgtaaggaaggtgcgggctcatggcgaaacgtaaaataaaaacatacgaacagctgataaaagaaaacaaggcggccattatgaataatcaaaagctgatgaatgtgatctatgacagaattgaccgcaagcatcaaaaactgctccggcacaacagccatacataaaaagagcctttttcaggctcttttttttattgctcaaaggcttccgccgctaatttgccgatgaccgcatcgtccatcggcggattgtgaaggccggcccgggcatcccgataataccgctgaagcggattatttcgctccaggctttttgcgccggtgattctcattgctttgtcaacaacagaaaggacggcatttgtcacaatatgttttgccgcgccgagctcgcttttgatgaaagggcggcgtttcggatcatcatacatttgcgccgccgtgaagagaaactgtctcgcttttaacaattcaagctccatttccccgacacgctgctgaacggccggcacgtctttaatcggtccgttcaggctgttcggcgaatattcagatgcaaaccggacggcatagtcccttgccgcttgagcgatgcccagataagcagcgggaatgtgaagcagccagccattcactttcgccgctctcggcccgctgataagctccacaagccgctcgtcactgaccgtgacatgatctaaaaggagatcatggcttccggtcgccttcatggcaatcatatcccatgtttcttcgactgaaacgcctgcctgatctttatgaatgagaaaaacaccggtcgtttgtttttcttcaatccatgccgtcacaagcatataatccaaagtcagtgaaagggttgtaaaggtttttcggccgttcagcacccattttccgtcttttttgacagcggaagtgccgggtcttcctcccctcgtcggactgccggtctgccgttccgtcgctgccctgttcaggacggctccctttttcacctcttttgtgataaatgaaaagacaccttcatcccagctgtttccttctccgagctcacccatgacggataaatgccagccgattccgagagcgacggccgcgtctccccgcgccagccgttcctgaaacagcaccatctcataaacggaaatgcctgcaccgccgaatgcctcaggtaccgttaacgccgtatatcccgcgtcgcgcagtctttgaattttctccgcgggaaaacggcccgcctcatcatcaagcgcggctgttttttgaaattcgtctgcaagcaggccgattttttccatccattcccgctgccgttcattctgtatccataaagacactggaatccccccattataattccgataaagttaataagtattatagagattcaagtctcgtttcgcaactgtgaggctgtacaaaaaaacgcgctattccatagaatagcgcgttcagactgcttccgggccgcggtcctgcttgagcccgagataaatcagcatatatgtgagataacccatcgtcatcacaagcccgccaaagaaaaagcttgaaaaaatcggctcttcaaacgcggtaaccgccgcaagcacgatccagcttgcatacaggtagatgatgaaataacggaatcccgtcttcattttatataagagaaacagccccactgtagaaaacaaacccagcgcaagcctgaaataaacaagatgttcgaattgaaacatgaatgacacaaaggaaaaaccaagcaataacacaatcggtaatgcggtaataaaatttctcaagtgagcacctccgtcattacctttattataaatcaaaatagcataaattattgatttatcgtgatctttttcacaaaaatgtcattcctttactttatacccgaatatcgcgtttgcaaaagctccaccaagcgacggctaagaagaatacgatatggataatgataatgcctgcggaaaataacggcgtcattcccgcaaacagcggcttcgccccgctcatatattgcgtcaggtcagtatttgcgaacagcagaaaactaccccatttgttttggaagagcgacataatcgtcacaagtgattttgcgccgtacagcacgataaatgacaaaatgacggccgttgcgctgtttcggaatacagaagaacacaacaagccaaagcatgccatcgcaaacgcctcgacccagttcgtgccgattactttcagggtgttcacaagaagcgtccctgattcagatgtcaccgacactccgaagaaagccatgccgaacagcagagacagaatatagtacgccgcatacaggtacaagctgaccaaaaatacggtaatgagtttagatacaaaaatccgctcccgctttaccgggcggattaacaaaaatttgatcgttttcttatcaaattcagcggaaatgatcgttgccgcgatcacgatcgttaatgcctcaagcagaatattcagcccgggggcgtacgccatatagccgatgaaattctcatccgttccggaactgatgacaagccgtttaatgacaagcgccataataaattggagaacggccatcagaatcagcgccactaatgagacttttcggttaaagagtttcatatgctcattcgctgtcaatttaaacattcgtcttcccctcctcttgaagcgccgtcgtcactttcatgaattcatcctccagcgattccgcatacggcatgatggaatacacgagaaagtcttgtccgacgagcgcacggtttaatgccgggatgtccttcttcgctacggtgacggtaatgctcccgccgtttttctccggaacgaattgctgctgggacagccattcgaaggcttcgtcagccggctgaatgtcgaggatggctttttcttctttttccgcagcgccgcgcagaacaacctctgttttgatctcacctttttgaatgatgatgacacggtcgcaaaggtcctccacttcacgcaataaatgcgtcgcaaaaaggatgctcgtcccttcaagctccgcgagttcctttaagtgatcgcggaaatccttcattccgccgggatcaagcccgtttgtcggttcatctaaaatgagcagattcggacggtgaagaatggcctgtgcaatcccgagacgctgacgcatgccaagggaatacgttttaactttgtcatgaacggcatttgtgagcccgacccgctcgatgacttcctgaagcctgtcttctgtgatgtttttgtgcatgttggcaaagtgcttcagattttcccaccccgtcaggtacgggtagaattcaggattttccacgatcgctccgacggattcaagcgctttttcgaaatcagcatcgtgctgaaagccgttaattgtaatcgtgccgctgtttttctttaaaaggccgacgatgattcggataagtgtggtttttcccgacccgttcggaccgagcaaaccgatgatctcgccctgcctgacatccatgctgatgttttttaaaatgtgctttttgcctattgttttgtcaaggccttcaatatgtaaaatcggctcagtcatacagccttcctcctttttcacaaaaaataaacagtgcccgtacataggcactgtctgcattataacattagtcatatattcgtgaagagccggagccgtcgttatgtcttatccgggaccggtccgtttttttccttctcctcattattgacgacatccagaatatcaagcaggaacacaaaaatcggaattccgataatcaagccccaaatgccgaagaaatgttctgagaaaatcagaaccgtaaaggtaaaaaagatcggcagttccgtttttgctgacatcagtttcggattaaggaagtacgtctcaatcgcatgaatgacgaaaatgaccagcacgatgtagatgacgtacgcagcgccgcccgtcgtatacgcgatgatgctgagcggaatgagcgaaatcaccacacccgccacgggaatgagcccgaggaaaaagaccatgatggacaggccgaacagctgcggaaaatgcagaatcgccaatgcgatcaaggtgaggatacagttcaccagcgcgataataaattgggcttcaagcactttgccgaatgttctcgcaaatttgctgccgaaataagcaagttcgtagtaaaaaacagacagcttgctgtgctgaaattttttcataaactccgtgagccgctttttctcgaacaggaaaaacatgctgagaatcagtgacatcacgacctgcaaaccgaaagtgctgatatcggccaagtatgtatacagtacattaaaaccttcttttacataggaaccgatattgatatcgccgaacacgctcgatatctcatcataaaacggaatgacatcgggatgatacgcgatgtgcttgatctgcttaatcagctgttcaatctgcttggcaacaatcgggtaaaagacaaagcctccgacagtcgccccgacagccagcgcaatatataaaatggtgatgaccaccctctggctgatccggaaaaaatggttcaacacgtgccggatgacagtctccagccgatccatcagaaaagtaaaaataaacgtaagcaaaatcaaattaatcatacttcggaatacaactaacaccccagtcaaaacaagaaaaacggaaaaacgtctgacacccggatgctgaaaaaatttaaaaatagccgccatttatacactcctgctaggacaaaaagcccttagatttcatctttcactctctaattgtaaattatataacaaaatgacgctaaggtctttgtccacctcctaataaatttaaacaaatttatcttttttactcatggcggccgaaaaaaagaacggcatgccggatgcatgccgttcctttccttttataccgccgtttttatttcttttacggcctgtgtgcttttcgcttcgtcaaactcattttcgctcttggctacgatgatggtggcgattccgtttccgatcaggttgacgatcgcccttccttcactcataaagcggtcaacgccgaggagcagcgccagtccctccagcggaataacctgaagcgccgataaagtggaggcgagcacgataaatccgcttccggttacacccgccgcgccttttgatgtcagcatcagcacgagaatgatcgtaacctgctggccgatggtaagatcaacgccgaacacctgcgccagaaaaaccgtcgccatggacagatagatcgaggtgccgtccaggttaaaagaatatcccgtcggaatgacaaggccgacaaccgatttggaacagccgtaacgttccattttatccatcatccgcggaaggacggactcagaagagcttgtgccgagaacgatgagcagttcatctttaataaaacggagatagttccacaagctgaaaccgaatagtttgcaaatgatattcaaagcgacaaatacaaacaggaacatcgtaacgtatacagacagcatcagactcgccagcggcttgatggaatcaaggccgaagtgcccgatcgtataggccatggccccgaatgcgccgatcggcgccgcgcgcatgatgtagccgatgattttgaaaaaaacgtgcgacagtttatcaaagaaatcaataatgcttttgcctctttcaccgagcgccgccaggccgacaccgaataaaacagaaaagaataagacctgaagaatgtcgccttttgcgaaagcgtcaaccatatttgacggaacgatgtgagtgataaattcaatccagtcaatcccctgtcccccgttttgggtgtactgagagacatcccctttttcaagcttgctgtaatcaaggccctcaccgggtttcatgatattgacgaccagaagcccgataataagggcgatggtggtcacgacttcaaaataaataaatgcttttcccccgactttgccgacttttttcatgtctcccatcttggcgatgccaagcacgatcgtcaggaatatgatcggtgcgataatcatttttaccgcattgataaatgtatcgccgagcggcttcatctgcttcccggcctcaggccaaacgagtccgacaatgacgccgatgatcaccgccgtgatgacctgcaccgtaagatttttgaaaattttcatccctactcccccttgcctctcgatgcgtctatacaaagatgatagcgttttcatacgaagaggggaagcttatgatcataacggacattttggtctttttggtctcggctagcggacgaatttgtagcggttaaccggccgtcccactcccccgtattgaatgtcgagcttaatctggccgtccttctcaagaaaatcaagataacgccgcgccgtcacccttgcgattccgagcgctttggcggcttcttcagctgaaagcggctccgtctgctgtttcatataggtcaaaatttcattcatcgtaaaatggtttaaccccttcggcagatcccgggacggattttgcggaattttcagcagcatgtcaagctgctcttgcgacatcgtgtcatgctcttcaattttccgtttatattgtttatagttttcgagcgcctgtctcatccgctccagcttaaacggcttcaaaatatagtcggccgcaccgttttgcagcataagctggattgtttctttgtcttttgcggccgagacgatgatgacgtccacttcgagcttttgttttctgatttcctggagcgttttaattccgtcttttttcggcatgtatacgtctaataccacgagcccgggccgcagatcttttataagcctgattccctcgtctccgtcagcggccgtggcgatgacgctgaaccctgaaacaccggtgataaattctttattcacctcctgcaccatcggatcatcttcaataagcagcaccttgatgtccatcgaatgattcctcccccttcatcggaaataatatagaaaatgccgttccctgtccctgccgtgtgtcgacttcaatcacgcccatccctttgtcgacgatttgtttgacgaggtacaagccgtatcccgttcctcccgttttattgacggtaaaccctttgtcataaaggcgcgggatatgctgatcggaaatcccgcttccgttgtcttctattaatatagcaagcacttcatcattttgctcgatactgatgtcaatatgtttgtcctccgtgtccgctgtttcgaatgcgccgaacgcattttcaattaaattgccgagcaggacgacgatgtcatgctggtcgacatgctccggaaatgccgagaaactgctgttttcatcaattttcacagaaatgccaagctcttttcctcttttgattttgcttaacagcagccccgccgcggcgtcattctgaatggcctgatgaagaaaatcagtgacgctttcttgttctgatgattccttaaaagcaagccggagcgctttttctgattttccgagctgaatcagccccgcgatggtgtgaagcttgttcatatgttcatgattttggactctgagcgcatcgacaaaatttttcacacctgtcagttcttccgccattttcgccgcttccgtcctgtcctgaaaaatggcgacggctccgatgaccttctttttcatgacaatcggaattctgctgctcatgatcacctttccgctgacttggatttcttcattatatacggctcggttccgctcgacgatttcagggagccgcgaatcttttaacacgtcccagatcagcctgccgtcggtctcttgtctgacattgaatatctgcttcgctttttcattaaaaatggtgatgtgatgctgattatcgatcgcaatgacgccctcattcatcgagtgaaacgtagcggtccgttcctcatacattctcacgatctcatggggctcgagccaaaacatttgttttttgatgtggcgggccagcaaaaaggagccggccagtccgaacccgagcgccagcagaacgataaacagtatttcatgtttcagctgaagaagaatttcaccgaatccgggcagcgttttaccggcaaggacgacgccgatctgattcaaatcccggtctttgatgggataaaaagcgcggacggcggtgccgatctctccctttgcttcggaaaaataaatgtgctcggcgaacgccgcggcttcgtcctcaccccttgaacgctttccgatcattgtgctgacgggatgtgaatagcggatatgatccatatccatgacgacgatgtagtccgcttcattgatgatccttatttcttcgaccgcatggcgcacgtcttccctttgttttttctgctccagggcgcgtttgacatcggtcatctcagataccgtccgcgcggtattcatcagccgttttttcagctcgcgctcctctgtatgctggatattgccgaccagcacgatgccgacgatcaaaaaggtaaaaagcacgacgatataagaaagtatggtgattttccagcggatggtaagcttttttttcgtcattggcctcttcctttccgtctctttacgaaaacggcccgcccgattatgcttgttatagaaaatggcggagggggttttcgatgaaaagcttgctgacttgtctcagcctgatggtactcggtatcggaaccgctttattcatcggctttcatgatcgtttctcaacagaagaaccgtattatgatgacgaacaggaaggcctgaaagatcaaatggttttcaaattcagtcatgtcgtggctgaaaacacacctaaagggcgggcggcgaataaatttgccgacctggtctatcaaaagtccggcggtaccattaaagtagaggtatttccaaacgggagcctctattcagataatgaagaaataaacgccctccaaaacggggacgtgcaattcatcgctccctccacctcaaagctcggatcactgtctcccgaatggggtgttttggatctgccgtacgcgtttacaaactataaagccgtgcaagaaggcctcaacggcaaaatcggcacgcgcctgttcgcttctttagaaaagcatcatttgaaaggactggcgtactggacgaacgggtttaagcagctcacgtcaaataaagggccgatcttctctccggacgatttgaaaggacaggcgctcaggatcatgccgagcagcgtgatcgaagaccagtaccgcctgctcagcgcgcacccgcggcaggattcctttaattccacgtttcagctcttggaaagcaatctcgtagacggagaggaaaatacgatttcaaatatctattctaaaaaattttataatgttcaagattatttgacaatcagcaatcacgggtacctcggttatgccgtgatgaccgacgagcatttctggaattcacagacagaaaaaacgagaaccatcttaacggaggcgatgagagaaacgacggaatggaacgaagcctccgctgagaaaatgaataaagaccagcttgaagagataaagaagaattcatccattcatattcatgtgctgagcaaagcggaaaagaacacatggatgaaacgcctcgacccgatttacggacaatatgaacaggtgatcggccgcgggcttgtgcaggatttgttatccttgcgccgcgagccttagcaggaccaatacgcccatctccgtttcatcccttttcccgccggggaagtaaatagggacagagcaaaaaaggagatggagacatgtttacacatacgaaaaaactgcagcatccggctaaaccggatcgtcctgacccgctgttcgcaaaaaagatgcaggaaattttagggggacaatacggggaaatatccgtcgccatgcaatatttgttccaaggatggaatacacgaggcaatgaaaaatataaggatcttctgatggataccgcgacggaagaaatcggccatgtcgaaatgatcgcgacgatgattgcgagactgttagaagacgccccgctggcagagcaggaaaaagcggctgatgatccggtcatcgggtccattttaggcgggatgaacccgcatcatgccattgtctcaggactcggcgcaatgccggagagcagcacgggcgttccgtggagcgcaggctatatcgtcgcaagcggaaaccttctggcagacttccgcgccaatctgaacgccgaatcacaaggaaggcttcaagtcgcacgcctgtatgaaatgaccgatgataaaggcgtgaaagatatgctcagctttttattggcccgcgataccatgcatcaaaaccaatggcttgcggccattaaagaattagaagaacaggaaggtccgatcgttccttccacattcccgaaggcgctggaaaaacagtcattctcccataagcttattcatttctcagatggagcagaaagcgctgaacaaaattggctgaaggaaacagcgccggacggagaaccatttgaatacgaaaaggaaccgaaagcgcacggcgaaatagctaagctggaccccgtcccgccgtatgtccacaacacgcttcccggacgaaaataaaaaagcctctaaaggggctttttttatgtgcgcacaactgtccagtccggttcgtaccggatgtcggggtgatgtaacagctcgtgaatgacaggttcatccccctcgtacagcatcacttctattgaaagaatcgcagccttctgctcgttttcttcgtatatgcggtcatgttcgttctccataaaatcatcataggcctgtctgtcctcccaaacgctgatgatctctgcgatgaacaggccgtctgcgtttttccgccagccgcctgcctgtctgacgaagccatttacacatgataatgctccccaccttgactgtgcttgcgcaaatgcttcagcgtttgcagcgtctgtttcacatacaatctttttgatcagcatgaccgttcctctgtgatgactgttttcgcatgcgtatgctcgacacagagattcacggttctgacgtaagagcgggtgcggtgaatcgtgcctttcgggatgagcaggctgtcatttgctttgagcactgcggtttctttgtccttaaaatcgatcagcagctcaccttccagaacgatgaaccattcatctgagtcagggtgatggtgccagtcatattctcccgtaaacactgcgaggcgcacacagtggtcattgatctccgcgattgaaaaattgtcgtgtttttctttgactttatggcgatagcgagcaaattcagcatgtcagacacgagtgaaaaacccctttttcattttattgtatcggttttgcggctcagatcaagattttcccaaaatcaaaagcgatccggctgatgtgccggatcgcttttgatctgcaggttgtctgccttttatgcttttattagctgcttcgtctgtttccgcctttttggccgatttctttataaaactctttgtcatgatttttacttgtagcttctccgcctttttggccgatttcctgatagaattccttgtcatggttattgcttgtggcttctccgcctttttcaccgatttcctgatagaattctttgtcgtgatttttgcttgtggcttctccgcctttttcaccgatttcctgatagaattctttgtcgtgatttttgcttgtggcttctccgcctttttgaccaatttcctgatagaattctttgtcatggttattgcttgtagcttctccgccttttttacctgcttcttctctgctcattttgttattatcttgtgccatttttgaattcctcctttaattggtgttggttgttggtttcccgatttcagaactgataaacaaagaaaacacattgaatgtgttttcgggtggttttttatcattctgtatcgttcatgcgttttagaatccggcgttttttataaagcatgatgcctgtttccgcgatgctttctaaagctgaacggttggcggacgcgccgaagatgatgcctgcggccggaaccatttgcagcagttttttcgcggcgaacgtatcgcggtagctgtaaacgacttcccgccagccttggatttgcgaggcgacgcgctgataggtttggtcgttttgatcatattgccgtaaatcttgcaggatcgctttttttccgatgacgtcactggatgcaagctgaagcaatttgacgataaacacgcgttcttttttgtctttcggatcaaagccgtaagcaaccgcgatatcttgcagcgtctttaaggacaggccgagcatcgccggaatgtctgccgcaagcgtaaacacgccgccgactcccgttgcggctccctgcaccgtcgcggcctttacgcttgtacgcgctatggcttctgcgatttcgtccatgacggcaagcggcgcattgcggatgtcgtgaagcgtttgacatgtaccgtgcggcagccgtttttgaaactttttcatgatgcgcttttctgatgtaaggtactgtccgcctgactgaataaacgttcccgtttcatcgagaatgagtccgattttcctctgaataaattgcggtgtcagcttgtccaaaagctgaaacggcaagcgggtgaatgtttgccagaacatcgccctctgctgcgccttttcccatttttgaatgtctctcagttgtctttccaggtctgtccgctcttctgtcacccgtcctgcacgtcctttctgatttctttctacatagtatacctttatggcgttttctttttacacccggccggactttttatccggaaaacattccattgattaattttcttcaaattctatatattttataattttgaataatacgattgaaggagaatgctgtatgcaatggatttatttaagtttagcgatcatttttgaagtattgggtacgatcagcatgaaattatcaaatggatttacaaaacttgttccaagtattttattgttattgttttatatcggcagcctttgttttcttactttgactttgaaatatataagtgtctccatcgcgtatgcggtctggtcgggaatggggatcgtactgatttccgcgatcggaatttttttctttcatgaacagttctctgttataaaagctgtctctgttcttctgatcatcatcggtgtcgtttccttaaactttatttccgaaagtgaaacgtcatcaaacggcatcagcgttcatacggacagaaacaggtgatgaaagggttaaaggttctcttcctcattacagatattggatttatcatttattggattgttactttttttgagtagattccaaaaaacatggcgtttaaagattatgataacgccatgataatggcctggaactggtcattctttcccctagatattttcatttcattgaccgggctgtacagcttgtttctttataaacggaaacattcgttatggcgccatttcgcattaatatcacttgtgctgaccttttgttcaggcctgcaagcgattgccttttgggtatttatcggtgattttgatctcatgtggtgggcattcaatctgtacttgcttctttatcctttatattttattcggaaattgctggtctctcgtaaaaatagctgtcattctttttgatgaggcggttttctttttcttcaggcgggaaacacttttcataaaggagtgatagacatgccttggtctatgaaggattatccgcaatcattgaagaatctcgaggaacctgtgaagaaaaaagcgatcgaaatcgcgaatgcgatggtagatgagggttatgaagaaggacgggctattcccattgcgacaagtcaggcgaaagagtggaaaaaaaacgcttctaaagaagaaatcgatcagctgatgaaacacgatgatgaaacgaaacgcggaaattgaatcggaatatagaaaaaccccgctctcaagagaacgaggtttttctgcttataaaccgtaataataagatagtgtggtgactgaaacgtagcctgtcgctcctgcatacgtgactttcagccatttattggaattggtgtagtggccttgaacatattctccggtgacccaagaacctgtaatttttttaccgcttgagaatgttgtgatcgttgaacagctgaccttagagcatgagcgcatattagcaccgtaaataccgactgtgcccccgctggctaaaatggaaacgtccggttcagctttaggtttgaaagctgctgctgatgcagagccgccaaaagcgaataaagaaacagcaaaaatcatggctaaagaaatgatcgacaaacgacgtaccaagaaaattccccctcttttatcatatggccggaaagctttcctgacgttattatacttttttgcccggaagactgaaataagtctaatgctccaacttcttttcttcgcaagtgaccatgccgattctttttttgatagataacagccgtttattggactggaatcactgatatatcgttgattcaaacgtttattcagagcggccggagtttttccggaggtcatttgaatggtacagaaaggttttatcttccaatggaaagaaacattattattctatttacccgggaaacggaggaaatactgcgtctttttctcaggatcagttgcaccggacagaaagttgtgaagtgatatgagcaagtgttctcttttcacctttttaaaagaacgctcaacgcatccgcgcatgatcggacgcggaaacatgctttgcgaacggcatcgcttctttcccggaacgatgccgttttcattttcggacctttcttcggcgggatacatatcatagataaaacagggcatcaatgtaccggtttattgaacataaagaacttgacatctcataaaagcggatttatgatgtagataaaataatttgcatctaggaaactttttgttatttagctaaaaatctatcggaatttaggtgagacataatgagcaaagacatctcagcacaatcactgcaagcaaaagccgtgcaggatgcacttgacggcaaaagcaagggattcaagcggcttctgcctttcttaggcccagcctttatcgcggcgattgcctacattgatccgggaaacttcgctacgaatatctcagctggttcgaaatttgggtatatgctgctgtgggtcatcctcttttcaaacttgatggcttttttaatccaagttctttccgcgaagctcggcattgccacgggtaaaaaccttccggaaatcgccagagaccggtatccgaaatgggtatccgccgggctgtggatacagggtgaactggtgattatggcaactgacctggcagaatttatcggggcggcgctcgggctcaacctgctgttcggcataccgatggttgaagcggccattatcgcggcgatcggatcattcgcgattttagagctgcagcgccggggttaccgggcgctggaagcgggcatcgccggacttctgtttgtcgtggtgatcgccttcgctctgcagaccttctttgccaaacctgacgccggctctgttctcgaagggctgtttatcccgaaaattgacggaatggacagtgtgctcttggcaaccgggatactcggcgcaaccgtgatgccgcatgccatttacttacattccgcactgacacagcgccgtgtcgtcggaaaaacggataatgagcggaaaaagatttttagattcgagacgattgacattctcatcgcgatggtgatcgccggggcgattaacgcaagcatgctcatcgtcgccgccgcgcttttcttcaagaacgggctgtatgtagaagatttagacgtggcttatcagcaattcggccactatatcggaccggcttcagccattctcttcgggatcgggctgctggccgcagggctttcaagctcttctgtcggcacattgtcaggcgatattatcatgcagggcttcatccgttaccgtatcccgctttatttgcggcgtttcattaccatcattccgccgatgatcatcattatctcgggggtcaacgccacagaagcgctcgtatggagccaggtcgttctttcattcggcatctcctttgcgctcgtgccgctgattatgtttacaagcaacaaacgcctgatgggcgccctgacgaaccgaaaatgggtgacggctctcgcctggctgattgcggttttggtgatcgcgcttaatctgtttgtgatctacgattcattccgttagaaaaaaaccggccgtagcggccggtttttcttttgacgccggatgccgttcgtatctttttccgggcgtttttggtatgatagaagaaaaatcggagttttgcttatgtcagtatttatccttttttatctgtggattgtgccgattgtcatcggtatcttctgttctctttttgcttatcggacaacgggtaagaaacgtctgattcccggctttgtgatgatcgcattaagtatcgtttccttaatcacggggctttggatcggcggggtgaactatcatgtgttcatcggaggcatgtttttattcggtacgtttttggccggttccgccttcccgtttttcttcgctctctcacgcaaacgaaaataaacaggcatgccgcctgtttattttttttacctaagcctgcattataaaaaccgctccgataatgtgattccgcctcaatcagcctatacatgcaggctccagcccatgttcatttcacgaaactgcagctaaaataaatcctgccaaaaaaaaattttgaattgcgagaaaaatatcgtattaaaatcctatttacccaaaaaatacctattgatagaatggtatctgagagggaaaaatgttcaaagcggatcatacaggtcccgcctaaatacatagtctttcatttctctctacactacatttctaaaggaggatttcccattagacacgcagctaaaggcattctgtttgccgcatctttagcccttgtaactactgcttttgtccccgcatccttagctaaagaaaatcatcataatactgccaatgccactggaacgacaaaatcatttttttatcagactgatacgcaattttcctacggacttaaagcacaaagcgatgcatctgtgtcaaaaccagtcaaagatgtaatcagagaagtgctgaaaaataaaacaaaattattcaatcttgttgaaaaattagcaggaaagaaaataagaaatgaactcgaatccgttttcaatgaacacatcgaaccggttttaaagaaaatgctgaacgagtatgtcgccttaagctggactgacgtggaaaagaatctttatctttcacttaaaaagtccggactttctgacagccaggctaaaaacctcgctcatttgacaactttagcaatgaaagcattttaaaatcattcataaatgatcgtcaggaaaatacgtataaagtaatgcaaagtgctgttagattcactctaatagcactttttcattggagatgtcacatgactgtcttttttactgttttgctcactttcttatgctgccttgtgatttcatctcttatttttatgattctattaaaaaaagagatcgtggatacaccgccaaaccgcttagctcatgcagcattcatcatacttattggattctccctgttcttcgctgtgactgtccccagcctgattatttgttttgcagctgtaacaatacatcattttttcggagagtatatcatctatggttcactttcagacttatacatattttctgtcgtcgtcagtatcttagctttagtttatatgctaatccttacggcaattgtaaaaggaatgactcatgtttttacattacctgcttggtcagcctatatccttgaattcatttttgcatgggctgctgtttacttctcaatccaatacgtttccaatcatatcattgagaacatatctatatttcaaggtggagaaattcttctttcattgttcatcactttcttattttcgggattggatatcctttttactaatttggataagatcacaaaagagaaattaggctaagggggtaacaaatatgaggatcatgacatatatatcttatttttctatttctttagttttgcaggtggtatggctgctattaataaaagatactcctaatatatttctgatagatatgattacggtgtccttcttattcactctctttatgttcatcttggatcaaatgttcaaaaaaaagcggacaaattagggtctgtttttaataatcctcgggcttctctttcgttttgaaattgttccggatctggggatgttgcggcgaaccgttcattaatgtttaacaccagcctcggtaaaatacttctccttttatataacatcctgacttttccgtcatatattcaaacgaaaaaacggcaaaaaggagtaatgaaacatgatattgtttattggcaagttcatgttgctctttttattctgttcgctggcatattatttgtttaaagttgtttattacaatatagggaagaacattgcgcttaaaactccgaaagggacaaagacgaaccggacggcacatgtgtttgtcaaaaatggaactaaactgaatgatggagattactttatgatcgctgttgtgaccgctctctggctgttcttcagatgaaaccgcgctgatccatcacgagttttttgatcagccatcgctcgccagctgccgattttcacaatcatcgttttcgtttaggacgactatatgcaagcaagccgctcaacaaacaaaggagctgtcgagatcttctcgatagctcttttgtttgtccttgaatgattgaagataggcttaaaaatggacggcgtctttctcatgcatgcatcgttcaagaaaacacttcacagcaaaacggaaaggtgaacgcaatacaagtaacggttaagaaccttatgaggcagcgtatgttgattactggataagaaaaagaaatcccccagtcttaaaaggtggaggtcaaaaattggagaacacttaaatatttatagctttttcagcgatataaaaagttccagagtcactcatttcagcagtataaacatttgtcacacttaataatccagtaaaaagaataccgattaaagcggagctgattataagtttcttcattatatagcctccgtaaccttaagtatttgtgtttgggcatgtatggttttctttaaaaagtttcttccctctgcatagtttctcttctcaaaatgaaagtcacctaatttttcggttagctctgcgaaatcagaccaaaggcgtttctcttccaagtaacctaagctttgtttcacttctgtttcattatattcttcgtacaatgaattaatgatttttaatttagccaaatattcctcttcattagaagtccgagcacgatttaaagccgtttcataaaagaaacgtgcttccttggctttatcacattggtacaggacattcgccatcatatataatgatctcactccatacactgtatcaatatgttctttcacgtctattgcctttttgaaattctcttcagcagcaatcaaatttttccctcttaaataaactaagcctgagttatgaaagatcactccgataattcttttcactttttcctcatccaagccacgggcgttacttaatgcttcccgataatatgattctgcctccgtcagcctgtacatatcgtacatgttagcaccgaccatcatattacagccaatcactttcactttgtataattgatttttttcaaacaattgcttggctttttttaaatgattgagggaaacaaagtgctgatcaatttgataataggcatcagctattttgtaatgaaattcagcttgctccatttcatctgatacagcattcaactctctctctgctttgcgataatagcttatcgcatcaacatactctttatgatcaaattcatacattccacgaaaaaataatgagtaatacttcaagaggcctgtaagtcttttttgcggcttttctattttttcaagtagttcgtcgactgtggggcgatctcgatatctgtcttccggctccaaggaatctaacatcaattggtgacgaaagcacatcaatgaataaaaaacaagcaaatcctgatcctcttccatctcctctatttcctgttcgacctcagcctttaaaatctcagcatcaggcacactgaactggcgaatcattttgtaccattcattgatcttgacaccaacttgggacgacggtaaaacttgatccatatatacctctccctctaattgctatttttgtaatattataactatttgaacataaagtgaaaacgaaaaaaaaccgcaatttacttttgcgtcatactcacctgattaacttgttttaagacacagggaaattatacctcaacataaaaatactgtataaaaatactatttacccaaaaaatacctattgatagaatggtttctgaaggaggtggaaaaatattcaaagagaataatataggactatcctaaatacatagtctttcatttcgctggcagattacattcctaaaggaggatttttcattaaacacgtagctaacggtattctattcgccacatctttagcccttgtaactgcttcttttgtccccacatcctgagctgaagaaaaccgagataccactactaatgccactggaattaccaaaccaattttttataataattgataagccgttttccttttagcttaaactggttttaaagaagctattaaacgaatatgttgccttgagttgtattgacgtggagagaatctttatctttcacttaaaaagtctggactttctgacaaggctaaaagcctcgctcattggacaacgttagcgatgaaacattttattgttattcataaattattaggaggaaaatatatatgaagaagaaagtaatccctgtagttttaagcgcaactctacttacatcattcttgggtacttcaggtgctttagcagctgaaaacagaaccacaactcctgtaccggtaacgaaaactgcaccaggtactattccaactggaatgcctggcactattccaaccaaagcggctctcaatggtgactaccaaacccaaggtgtagtttcgtggtcctataaggctttcagagctgcctgccgttcaggtggatggcttttatcaaaagccttaaagccattctcccctaaagctgcggcatggattagaaaaaactctaagaaggttgccgacattatggataaaggtgaaaattggggtgtaaaacaatttacaaaagcttttaaagctatcggagctcctacagatgtagctaccactttagctaaattcattgttgctttgatttaacatatttaaaatttaaagtgctgttagattcactctaatagcactttttcattggaggttaacatggctatctttattaccgtattgctcaccatactatgctgtcttgttatttcatctcttatttttatgattctattaaaaaaggagattgtggatacaccacccaaccacttagctcatatagcattcatagggcttattggattctccctgttcttcgctataactgtacctagcctaggtatttattttgtagctataactgtaaatcattttttcggagagtatatcatctatggttcactttcagacttatacatattttctgttgtcgtaagtattttagctttaatttatatgctaatccttatggcaattgtaaaaggaattactcatatttttaaattacctgcttggttagcctatatacttgaattcatttttgcatgggctgctgtttacttctcaattaaatatgtttccagtaatttcattgaaaacatatctatatttcaaggtggagaaattcttctttcattcttcataactttcttattttcgggcctggatatactttttactaatttggataagatctcaaaagagaaattaggctaataaaaagaaaagcaggcaatttagagcctgcttttttattccctttttaacatttctccaagccttgctttcgttttcggcccgtaaatgccgtcagcaggcagtccatacatggactggaaccgtttgactgcatttgctgtcttcggtccgtaatagccatctattccgttgttctttgcccctttgtccggataataatagagagccgccaaagctgtctggatctgtttcacggccgttcccttagttaaggggcttgtcactttaaaaacgcccgatggcagcgtgtaagatgattttttgccttttgttggagagctggccgagtccgtcagctttaatacttggccgactttgataaaattcgggcccttgatactgttcaatctctggatggtggccatgtttacggcagttttctgtgcaattacagggaggacatctcccttcttgacggtgtacgtcgccacgccagtctttgttcctgtttttgctgataagggctgtgcgatgctaatgagcgaaccacgtttgttatgaactgtcctggccctccaaaagcttttttatcagccatcgcttgctagctgcagattttacgattttctttaccgtttccgcagattttaatacgatatactttcggttacggttcccgtcctctaagcttccaagcgggtcaaactgctgaccacttccttaccatggaagggggtcagtaaagaaataatcatcaataagaaagcctaaaaaaattaacaggcatgctgcctgttaatttttttataaccaccggcttcttaaaacagccgttttaagcttttcttgagtgacggcatttcgattttttggttttcaaagaagtttttcagcatgtatttgctgaagcccttcgcttggccgtaagtgatttttcccggaagcggcggctcgtcgccgatgacggcgtcgatgacgaccggctcatttgagttgagcgcttcatgaaaagcgggagccaattcctcgtgtttcgtcactttgatgccttttgccccgcagctttctgcaaaggcggcgtaatccatattttgcagctgggtgacgtagtcaatgttgcctttgacccgctgttcatattcaatcatgcctaaattttcgttgtttaatatgacaaccgtaatcggcagtttatatttaacagccgtcggcagatcctgcatcaccattgaaaatccgccgtctccgcaaatggcgatggactgccgatcaggttcggcaaggcttgcggcaatcgctcccggaagcccgcatcccattgtggcgagccagcttgagacgataaagtcctgcttcttcattttaaaatggcgggccatccacactgtaaccgttccgacatccactgacaggacggcgtcctctgcggccgcatcctgaagccgggcaatgacctgctgcggcttgagcggatgagtcgcttcggtttcatccttttcgatttccttccaccaatgcttcatgtgctcggtgcaggcgtccaaaaatcttctgtcttctttatattcaatgtattccgtcagctctttcagccccagagccgcatcactgacgattcccgcattgacgggatagcgcttgccgattttcgccggatccgaatcaagctgaatggcgggcgtatcatccgggagataatccctgtacgggaacgatgtgccgagcatgatcagcagatcgcattcctccatggcttcgtaggcgggctttgtgccgatttgcccgagattcccgagaaagtggggatggctgtcaggcacgacgccttttgccggaagagtaatcacaatcggagcggccgctttatcggcgaatgcgagcagctcctcttttgccgattttaacccttggccggcaagaatgaccggtttttttgcgttgttaatatattgcgcgcatgtgacgagatgttcttttttcggctctatatcggctttgaggtatatcggcgatgtgtaaaccggctcccgtttgattttttgcgcgaataaatcatcagaaacggttaaaacggcaacgccttttttgctgtaagccgtgcggatcgcctgattcagaagatcgggcagcgcttctgccgtatgtacctgctggttgaataccgccacgtcctcaaacatctgctctaatttgatttcctgaaagctgtcacggccgatttcatcggaagccacctgtcccgcaatcgccagcaccggaacgccgtccgctttggcgtcgtataaaccgttcagcagatgaacggcccccggtcctgcgattgaaaggcagacaccgatctgcccggtcagttttgcctcagccgcggcagccagggctgcgacttcttcgtgccgggtttggatgaatgtcaggttatttcgttcatgtctcagttcttcgataaattcattaatgctgtctccgggaatgccgtatatatgaccgactccccattgttcaagcagctccgtcattacgtgtcctgctgttttacttggcatactgcatcctccttttacctgtattcatccctttttcatacgggttgaaacacgggctatactctcagcttttttctcagcagatcaaggatggataacagatttcggtctttaaggactgccttacgatttgccgccccattgagtccgtcttttatttgccgttttctgttcggcaccatgaacagcggcagccggttttgggaaaaccagcgtaaatcggcggtttccgatccgttcatcagcggtgttcctccggtaatggctccgatgaaaacgtgctgtgtatcttcaaatgccggcctttcatactcaccggatttttgcaggatggtcacgttataccctgtttcttcaaaggcctctctgacggctgcggcttcagatgtttcaccttcttcaatcccgcccccgggcaaatcccatagtggaacgtcttttcgttttacgagcaatatgtcccgcccatcattttgtatgatgacaaaagcgccttgtgccatgtcgtcctcctttacaaaaaagaccgcggcatttcagcctgcggtctttccgttactttttaaaatgatacggcagggtggcgacgatgatgtccttcttccaaaacagccggacgcggagcaagaaggctgattggttgtgaaggatggtctgccagcgttttttcgtaataaattgcggaaacagcaccatcacggagaactgttcttttttcgctttttgttcgaccgtttccaaaaacttatcaaacgggtgaaccagactgcggtatgaggaatgcagggtgacgaggcggacgccgttatgaagctcttcccagcgcttttccacctttttttcgtgttctctgtcaaaggaaacatgaaccgcaatgacctgatccgataatgatttcgcatactgaatcgatttttggacgacggtggtgacaccggcgacaggcacgatgacgacggttcccttgatttcctcaggctgctgatcaacgacccgcagctgttcgccgaccgcggtgtagtgatttttaatgacgaaaaacagcatgacgacagcaggcatgaataacagcaccggccagacaagattgaacttcgtcgcgaataaaatacacagcaccataaatgaaatggcggcgccgcatgagttgatcagcatttttaccgcccagcccttcggcttctgcctgatccacttgatgcacattcccgtctgcgacagcgtaaacggaatgaacacgccgacggcataaagcggaattaaatgttccgtgcggccgccgaataaaagaatgagcaggatggacgcgataccgagaaagatgattccgtttgaaaatcctaatcggtcgcctcgtaccgtaaacattctcggcatatactgatcgcgcgctaaattaaacgccagctgcggaaaagcggaaaagcccgtatttgccgcaagcacaagaatcagggatgtcacgccttgaatgaaatagtacaccgtatggcgtccgaaggtttccgcggcgatttgtgaaataacggtctcgttaggcttcggacccgtgccgtagccgtacgccagcaccgtaatccccgtaaataagatcgccagcagaatccccatcatggccaaagtgcgggccgcgtttttcgccggaggatttttaaaggccgggatcgcgtttgaaatggcttccacaccggtcagtgccgagcagccggatgaaaaggccttcagcagcaaaaacagcgtgatgcccgctacgggcgtgccgatcggtgtatgctcggccggatgaacctggcccgtcatgagcttaaacagaccgacgacgatcaaaaggacaagcgccgccacaaacagatagacgggatacgccaaaatggacgccgattctgacagccctctcaaatttaaaatcataatcagaatcacaagcaaaacagcaatgagcaaatgatacgggtgcagggccggaaatgccgatgtaatcgcgtcagttccggcagaaatgcttaccgccaccgtcagaatataatcaacaagcaatgagccgcccgcaatcaggccgggcttctcaccaagattttctttagaaaccatataagcgcctccgccttgcggataagcgtaaataatctgtctgtaggacagaatcaaagcaagcagcaaaatgagaacacccgctgcgatcggaatggaataccaaaacgcggccgcgcttaccgcagccaaaatgatcagaatctgttccgttccgtaagcaactgatgacagcgcgtctgaagaaagcatggcgagcgccttgagtttcgtgagtttctgctctccggccgcctgtgatttcagcggtttcccaatcaaaaatcttttgattgaatggtacattttttgtcttcccctttttttcattttccgtttgatttacaaacccttactgctatgatgtctctgaataacgattgcatgccatatttcggcacagcaaaaagacacagaggcaaacggatgcccctgcgccataatcgtgcacaggtttcattcatctcctctcatgaacgcttacgaggttagctgtcggattcgggctgatgagagttggccctacctgaaaaaggattcaccccaagcggcatgacgcgccgcaaattggttcccccgctctgattacagattaagcgatatagattataaaagagatcatactcccgtcccgttcagttgtaaaggggcttttatgctgtttcaaaaataaaaaatcaccgccaaaaatggaaataaaaatacaaaaaagaggcctgttaacggcctctttttccttcattactcttcacttttttcattatccgcttttcttttttccttcttgccgtcagccagatcagaccggccgcaataattataagcgccgcgaaaacagcgatatacgtgacgttcagtgctgcggaacggcttttcgtatcaggcgccggactgctgtcgtcggatttgatttgctgatggtttgaaaacagctgcttgccggccgtttcgttgacgacggttgcggcatcgcttgtgctgtctaaaaagctgatcagctcttttgtgacagacgcgccgctgcctgataacggagcaaaaacagcgatgcttcggccggagtcccaaggtgattcctgggtaaacgcgacttgtttcgttgtctcattcagcatctgaaacgaagaaacatcgtacgcgccgctgcggtctgacggcacgagaagcttagaggcgtttgatttcaaaagcggaatttgcggcaggcctccgataaacacaacattccggcctttggcatccgcttccttcatgtctgatgccgtctttacggtaaagccgtttccgaatgaatccgccaccagagaaagttctttcagtgtctgtatgtttacgtcatccgggatgacgatcactgttttctctttcacgccgcccgcaaacgggagcggccattgcccgaaatccgctttctgcgccgcatcacttaccggatacgtcagcatgctgcttttatcaatatagacccatttattttcgtcacggtcaatacacgggttgttatgtttcaaacctgatgtgacaaattgcagatcaatgtacctgctgcttcgcaaaagcttcggatcaatcgggattgagacgtggtaaaagccatctttatcttgattgccgagatcatcaaggcgcaccgcattcggctgtccgttgatcatgacgttcagctccgctctctcggcgtcattagctgaatccgccttcgtccggatcgattccgacgtctttaatgtaagtgaaagcttgaccttaccgtctttatcaacagcggccgccgcagggtaaaagaagtgctctgacgccgttttgtttgatccgaccgttacatttcccgcgccgaagtcctctaatgtcagtttattgcctgtcttttccgcagcgggctgaaggcggccgattgtcaaagtatctccgcccagctggcttgaataagcgctgtctgtgatgacgcggattttatccgccagcgttttgtctgagtgcgccgtgacaaacaggacgggctgccgtttgtcccctgatgtcagaacccgttcggcgagaaggagtttgttgtcttccgctttgaagttcccccgttcgaaaagctcttttattttcccgttccaatgctgatcagcgccgatgacaattgacggattgctgattttgccggcatcggattcttttacataggataccttcagcctgctgtctgccgttttcagaaatccttctgttttgactgcggcttcagcttccgccgaggtcggtttgtcaggaaggataatatcggtttcttcacccgtattgcctgattgggcaaacggatacgggaaatggccgagatccgctccctttgacttgcttgcttctgaaagcacaaggcggctgtccggataaatttttatccagttgcctgacgtatcctgcctgacgcagacgccctcttttaatacgccgtaaaatcgtaatgatacattgtgatagccttgggcggattggcttttgctgagattgagcttcaccgttttccgcttggagctgccgtcaagctttatggatttgacgggttcatcatcaatggcgatggttaaagaagacggggcaattaataagtttgacgcctcgtaatcaatcagaagcgactgatcggcattcgaagctcccgcaggaatctgataggtcagctctgagctgtctttcgccccgtacagtgtcatcagatcgccagtcagcgcctgctgctcttttgcgccggcgcttgttccgagagcggaaccgtccgttttcagctcccgggccgcggccgcctgcccgttatacatcaatagcaaaaggccagttatcaatatcgcttttttcaaaaaggtcacccgcttttattttgattgtatcgctccgttttgtaccacttgacttcctgcttgaacaatcggtgcttgatctctgtgaataatgaccagatgacgagcacgatccaagcctgagagtatgtaaagtacatcagaaatacgataaagaagttttgtttgttcatttctgttttttcaatgcttaaagtaatcatgacctcagtcataaacaggaaaaaggccagtatccacaaaatcatcgccaaaaacccgactgtcagatgcaggtcgtaaaaaagattgatgataaaaatcgtgtttgacatgatcacaccgaagaaaaacaaaaaatacgtaaaaaagaaataaaacagatcgaagatgatccgcttgcgtttcagcttgaaaaattgggataaaaacttaagaacgacgtactggttgccgcgcgcccatcttgtccgctgacgccaccagaccttccatgtctcaggctcctgctcccatgtcacagccgccgggaaaaagcggatatgatagccgagattatacacgcggatggtcagctcggtatcctccgccagcgccttatcatcccagccgccgagctgttcgataatgctccgcctgatcgcgaagttcgttcccgggatggtggcgattttgaaccatttccatctgccgccctgcgccatccactgaaaacagatggtttcaatattgataaacttcgtcaggatcgttttcgccgcattgataacacggaatttcccgacaaccgctcccgctttctcatcattcatcagaccgagaaccaggtagtacaccgccattttttccggcgtattgtccgcatcatacacgcagatcacgtctccgttcgattccgcgaaccctgagttcagcgccgaagattttccttttccggcgttcggggctttgtgatgaccattttaatgaagtcatactgacgggaaaattcattgacgatgtctcccgtccggtcggaggaattatcattaacgacaatgatctcaagcctgtctttcggataatacaggttcaccatcgccttcagcgtctgcctgatgacgacctcctcgttatgcgcggggatgagcacgctgaccttcgggagctcccccatctttgcgcgccatttcggaatgttccgttcgaaggtcatataatgcctgaatccgccctgcatcagaaacatgtgatagagaagcatcacccatattaaacttaatgagataaaaaacagaatgttactcaaggcttcttctctccttaaagattcgtttttttaatgtggcgcgcaaataaaggacgtagcaggcgaacatgatgataaacaataacaccacgccggagagaatccaaagcgctttttcaagaggcgtctgctggtgatgattgaaaaaggccgttaccggatgaatcttgttttccacatgaatggttccgtctccgtccgttttgatcctgacgctgtccgacgttaccgtttgcttcgttttcttcagatcgagccactcgccgccgggaatccgctccatctgattgacgagctcgggaaggtatttcatgccgagatacggatggtagaaaccgcccgccgttccgccgccgaaatcaatcatctgagaaatatgattctccatatctccgagcggattttcctttgagttatcggcataaccgattgtttcagggtacagcgtcatcccgtccagcatagccggctttgagacgaacggaggggcgcccgaggttttccacgtcgcgccgctgagctgcacttgtccgaaaatgctggagaaataagaagatgcgattttgtagccttcttcagacatcgtgtagtgcggcgcttcgaatgacagcgggtaaaggccgagctctgtcagatcgtcaatcgcctgctccagcttcgttctcgtgtagatgttttctttttcacggaaaggcttcacatacgcccggtacgctttttcattcggaaaatcctgttccttttcaagcttgaccggagtatcatccgcattttctgacgtaatcggctgatccgctttggcatcccaaaattcaaagccttctcccgtttcgctgtatcggtatgcgtgcgtgtagccgtgaataatgatgctaccgcccatttgctgaagttttttcaggacgctgaccatttttggcttgtccgccaggtatactttttctccgttttccggattgagatagaccggaatgaccgccagaataaacggaatgtgtcttttatgcaggtaagcgcccgcttcgtaaagcaatctttcatctgacatcggactgatgtcttcaagccgcaaataaaggagggtgccgccctctgattctccgaatgcgctgcgcatcgctttcgccgtcagaaacgaatcatttaacaggctcgtcacaccgaaataatagtcagagcgcgccgttttccacataaaagggcgggtgctgccgtcaccggaccggtatgtataaagggactttccttttactcccgatacgccgagcacggacacccccttttcaagcggcatgtctgttttttcttttttgccgtaaatgcggtataccgtttctttttctgtcagggacaaccccgcaaattggcggaactgtccggcgttatagccgatgctgataagctgctgcggcatgctgctgatcagtgacacaaatgatgtgctgagcttttttttcgtgacgccgtaatagatgacgcgccgattctttttgaagtccgcggctgtgatgtctccgtcgcttttcacggtgacggcggatgagaaatggcccgcggtcagatcaagcattttgacctcagcggtttctttgccgtccgtgcttgtataaataatgagaatgccgtcctttttgtcttttgcttccgccggacggggaacataaaccgccgaaatcatgaaaagcgccgagagtaagagacgtatccatttagagttcattcatcatcatctcgttttccagttcatttaaaaattgctcggccgtttgtaaatcctttcggtacgccaagtaacatacacggaaggtgatggagacgtatttaccgttttgcagccggtacgtatccaattcctttttcagcttcgccagaacggccggcatgttttcttcaggcgtatgggtcagcacgatgccgaaccgttcggcggacggcctgaattttttgtctgtttcccgaacgcttgaccggatttggcggctgataaacgccagcagccgatcggtctctttttctccgtatagggatttgaattccttgaaataatgcatgtgcagcagcaaaaagacgaaggaattgccgtagcgttccgcccgcttgatttcctcggaaagctccagcttcatccgcagatggttgtcaaagccggtcaccctgtcgacggcgacaaagctcgtaatctcttcacgcagctgtttcactgagcgttcaagccccttcgccaactcgtgaatccttcccgctatgtaagaaaagagcagcagcgcaatcccccaaatgaccagcacctgcagactttcggcatcggcagacgccataaagctcccggtctgaaaccacaggagcaggctgccgagaacaaataagacgagtaaggtcatgacgagcgcgtagattgccccgaaccatataccggctcccgcaacaagcaatgtgatgcaggttatcagaagccctgcggattgctgagacgcatagtaaataaaaaaagacagcagcaccagcataactgctgtgtagctgcacagtttttgtgattcattgaatgatattttcattaaacaatttcctttcagccagaagcggcagcaggttatcgaaagaatgtgtatcgctcccgctcatatagccgccgtaatcgggtttcagcgtgtccagtgtttcaaatgaagtcattctttcataaagcggcttgatgacagccggatcagctttttgttctgctaaaaaaagaacggccagggcgtaaacggacggtgattcgtactgaaccgccggctccttcgtgtctgcgctgtatcgtccgtacagctgtccgcgcgacttaaattcctctatcatccattttgacagcgcggcagccttgccatcgccccgcttcagattcacggcggcgtacagctggtcgatgacattcacttcgctgtcatatttgtattcctttgtttcggtattgaatgatttcggcagaaaaccatttttcaggggagctcgattgagaacatcaaggttccggttttccgttttctcatcgataatccctttttctctgagcatctgtaaggcgccggggtcaacataggacaaggtcacggtctttgatgcggcatttgaagcggcatcataataatccgtaaaatacccgtcatttgtattgtatttttccagcgccttcccgatctgcaccgctgttttcccgtattcactgtttccccacagggttccggcctcattcagacagttcatgattctgaaatcgtcaattaaggcattggtgccgctcgctttattcccgtcaatcttccacgacacgagcccgtttttcgtcagaaacgaatcggtgagaagctgatattgcgcttgaaactgccgttcatctttcctgttcagcaaaaatgccatccatagtccgagagactcagataaatattccggctcaccggatatgttcgtccggatcatcccccgcccgttcatcaatttatgataaataaaatgctctgcgggctgaagcggtccggacggttcggccgccgtctgtttttcaggtccggcctccgcgcaccccgccgtcagaacgattgaaatcaaaaggatcatcagacgaaaaacgaattgcttcacagtccatcctcctattttacaaatccttttttagacccatatcttattttttcacaaagtatttttactataaaggaaacgataaaagaatactagcattttttcacattggaaaattttaaatggaagcgccgcctctcaccttttccctcttcacatggatcgtattcccattacagtaaaaaacacaacaaaaggcagcatttctttacaaatgctgcctttctctgatctatttatccaggccgagttttttcagctgttctgccagcgcgttgttcatcggctcctctttgttttggcttttcatataagagttaatgtcccgcttggatgcgcgtccggatttatctttcgccttccgcttttcaaagacggacagtttctcccggtggccgcatacacatgcgaaggtttggccttcgccctggccgcgaagctccattttcttatgacagttcggacagcgggcgtttgtttttcttgccagcgttttccggctgccgcactcacgatcctgacatacgagcatcgtgccgcgtttgccgttgactttaagcatcattttgccgcaatcagggcaggcggtgcctgaaatgttgtcatgtctgaaagtctggctgctgtttttgatctccttcaccgttttgcccgcatatgttttcatgtctttaatgaacacggcggatttcagtttgcccgctgcgatggcggagagcttttgctcccattcagcggttaaggccggcgatttcaaatcttccgggacgagctgtaagagctgcttcccttttgacgtaatgaaaatatctttttcttttttctcgatcaagaaactgttgaacagtttttcaatgatatcagcgcgggtggcgactgttccgagtccgccggtttcacccaatgttttcacaaggttcttctcttctccctgcataaaggcgcttgggttctccatcgcggataacagcgtgccttcattaaagcgcgccggcggtttcgtctgaccgctcgtttctttcaatgatgagacagtgaggcgctgcccctgctgaagatccgggagcgtctggtctttgtcttcctcatgatcgtcgtcatcctcgtacatatcatacacggctttccagccaggcgattgaaccgttttcccttttgcggtaaatgtttcgccgccgatatcggctgtgacctttgtttcttcgtattcgaacgccggcattaacacggcgagaaaacgtttggcaatcagatcgtaaagctttcgttctttgtcgctgaggcttgaaaggatcagcggctcctctgtcggaatgatggcatggtgatccgatactttcgcatcattgacgaatcctttatgcgctttgacgccccgcttcagtatttgattgacgtactgggcgtacggcttaacttccatgccgtttaaacggtcttttaaagtcggcacgatgtctgcggaaaggaatctggaatccgtccgcgggtaagtgacaagcttatgctgttcatacagcttttgaagcacggacagcgtctcttttgcggagaaaccgaagcgcttatgagcgtcccgctgcaattccgtcaagtcgtaaagaccgggagcgaagctttttttcgccgtttttttcaattctgaaatgactgccggctttccttgcaggtcttttgccaaacggccggtcaccgtctgatcgaacgttcttgtctgttttgtttttttatcctgccatgtcagcgtcatctgatcagccgccgcgcggaggccgtaataaggaacgggtttgaacgcctgaatatccgcttcgcgtttggcgatcatcgccagtgtcggagtctggacgcgtccgcatgacagctgcgcgttaaatttcgtggtcagggcgcgggtcgcgttgatgccgacgatccaatccgcttccgctctggcaacagcggaatgatacaggttttcgtactctttgccgctgcggagcttttgaaatccttctttaatcgccttatccgtcacagaggaaatccacagccgcttaatcggtttgcggacgtttgccttttcgataatccagcgggccacaagttccccttcccgtcctgcgtctgtagcgattacgatctggctgacgtctttccggacaagctgagctttgaccgcattgaactgttttcctgtttttttaatgacgacgagctttaaaggctccggaataatcggaagatcctcaagccgccatgattgaaattctttgccgtatccttcggggtcagcgagcgttaccagatgcccgagcgcccatgtgacgatgtagcggtcgccttcaagatatccgtttccttttttatgacacttcagaacacgggccaagtcccggccgactgaaggtttttcagctaatacaactgtttttgacatgcttttcacttctctttctttcacactcatcctgttattataacagacttcctcacgctctctctaatcgaggacgttttttgtgtcaatttctgagaaaatgacgtgggtcacggtttgggcatacggagaggtgcggttgatgaagtgttcgatcgtttccagactgtccgcgttaatcttcagcatataacacgccgccccggcgacccgaaaacaaaattcaatgttgggaatggattgaatgtaggttttgaattgatcgtattttccgtttttcaccgtcgcttcgacaatgcaggagacggggagcccgatctttttttgatcaatgtccaatgtatagcgcttaataacgccgaaggattcaagctgtctgacacgctctgtgacggacggggctgacaatttgatttttctgcccagctcccgcatggacaggcggctgtcccgctgcagctctttaatgatgctcagatccacattatctagtttcatgactgtagtccttccttacccttttggctatattatcaagagaaatccgaaaaatgacaagaacaacaggctgaaatcatgaaggttttttcaggaactgacgcgaaatggtcatattaggactgccctttgcttatagtatagaggaaaaaagatgtccgacaggagggagctgtatgttacacacgccgatcggcagacttcgcacgatggggtttattgaaggaatgtcgcttttggtgctgctgtttatcgcgatgccgctgaagtattgggctcatcatccgctcgccgtcaccattgccggttccattcacggcggtttgtttatcatttatctggcggtgctggcgtatgcggcgtttactgtcaaatggcatgtgaaatggtcagccgccggttttatcgcggcctttattccgttcggtaattttatttatgatcgcggcctgagaaattatcaataaaaaagctcctcttctgcagaggagcttttttcatgcgttacatccatttcgtcacccaggcgatataataagcgccggggatgaatacgagctgggcgagaagcgtgcccgcgacccttgatgtgaccatcgtcaatgaggtccattttaaggagacgtagctgcgcttgcccttcgccacatcgtctgccagtacggagactttcgggtcaacaaacacggccagcagcatagtcgcaacgccgttgattaagcctgatgccataacggccgtcgtgctgtgctcaggcgccagaaggccggcgtacagagcggacagaacaccgatcgtgtaaatagacgtaatgaccatattaatgacaaacaagcgtttcggaatcattcggaattgaagcccctttaaataggagactgacggcagtctgatataagaacgcgcatgcttcagcccgttcagtgaaaatccttttttaaatacctgcatgacggagcctcctccgtccgccaagtgtataatcgccctggagaataacgcgacgaatgtcggcaaaagacagatgccgagcatcgttccgaccgtggagccgaatattaaaaatcgaaactgagcgcccacaacagacagagcgtttgatccggcggcatcaatcagatgtccggtaaacggctgctgaaccatgtttgacatgcgcgacacaataaccatgacattaaataatgacagcgcggacgcgataaatccgactctcgcgccggaaagccgtgttgcataggcaagcgtttcaatcgaatgtatcagcagcagaaaacagaagataaacagtacttgtgaagtaataacgtgcaatgtatgattcctccaaatcttttcatactgattagactctgcagactgcggcaaggtttcggccgtttacataaaaaaaccgcccggatgtccggcgcggttttgtcttattcttttcttacgcaaataaataatatatggttgcccgccttagcctgcgggtgattcgtattaacagttccgacagaatcattcttcgaaagtaaacaccatggaagttcttgaacacaagacaacgaaagccctacctctcaatcgtcactgcggctccgaagccgcgccggtgtgaattgtaaaacaaaaagtcttttttccatctcttcgttaggggcgaatatcagaaggaaaagaataagctcagctttttttcaagctgtccgttgaagcctgaagcttctatatcaaaacagaaaaaagaagtttactttcttttttatttgcatgttgtcacttagcagttaagtataacagattgcccctgaataatcaaatgatttattaaagttccagctcggccggcgttttttcacccgcattcatgagcttgatctgcttcggttcaatttcgagaatcaccaggttcggatcgtcttttccgtcaaaccagcgttccagtttcggatcccacagcttttcttttaaatctgctgagttgttcagtttggcggttccggccacttccacataagcgtcaccgaatccttcacagtcataccctaacagaatatgaacattcggattgttttcaatttcttccgctttatgagtgtctttgctcgtcggcgtgtaaatcgttaagccgtcatggaaaaatgtcatgtagcgtgaatgcggtttgccttgctctaccgtcgcaagcgaaccgactttatgatgatccagtacttcaagcactttttctttgatttcattttgattcatgaagaatcactcctttttaacgtctccgctgttacttttccacattggggagacatttaaaccaagaaatgtgctcttctgccgatcttcgctccattcccgcttcagcatgctgtagttcaccgtgtcatgataggcgccctgtacaaaaatgccttctctcgtcagtccttctttctgaaatccgagccgttccgccaccgccctgcttttcgtgtttttttcagccgcgctgatcatgatgcggttcagcccgaggtcctgaaatgcatgggtgatgaccgcccggcagcttgcggtgataatgccgaatccttcatgctctcgatccagccagtagccgatctctgctttttgattgactgtatcgacattatggatgctgatcatgccgcaaaaccggcccttcacaaaaattccggcgtcaaacccattctcttccgcatatttatagcgccattcggggatgatcacatcgcggtacgtatcgatgtcagccagttcttccgcccagctgagccattcgctgagatggttttgatttcgcttcataacagaatacaattcgtccgtatcttctttggcaagcaatctgatcgtcagatgttcccggatttgacaggaaaacacgaccgcaccttctttcctttattagccattatacaggtaaatttatttttttccatacaaaaaagatgaggcgtgcagcctcatccttaaatgcgcgggtcggtgaaaacatcgtgatcatccgtgcttgtcgatgacatttccgtaacgaccgccccttcttctcccgcttgaaaccaatgcttcgtatccggcggaatggtgtattgtccgcccggctcaagcacaatctcatgccagacggtgtagtattccttgtcttcttccggcgggaggacgcttgggttctctgtcttttcgccttccacgtagagatacaccttcccccagcggcatcggaatgtctcttgttttcccttctcgccgccgaccggcggatggcggtgttccggacacgtctggcgcgggaagagcaccaattctttcgaacagtagcggtcggtattcacgtaaataaacagctgaagcccggtttcctcaagcttgcctaagccgtaatccatgatttgaatgtcttcgacttcatcatcagtcagaacgattcccgctttttgatagtatgcattcacgtcatgtttcgatatcgtcatcggtcagcctccttatgtggtcacaaatctgccgccgttgacatgcagcgtctgtccggtcatataagaggattcgtctgaggccaagagcacatagcagccgacatgctcaacaggctggcctgcccggcccatcggcgtatcctgaccgaaggaagcgactgtttcttctgagaatgtcgccggaataagcggtgtccagatcggccccggcgccacggcgttgacacggataccatcgttgacgagcgcttgcgccatggatctcgtaaaaccgttaatcgcgcctttcgtagccgtgtagtcaatcagctgcgggttgcctgtgtaaggattaatggatgtcgtattgatgatcgcgctgcccggcttcatgtaatcaatcgcttttttagtcaaataaaattgtgagtaaaagtttgtcttaaaggttctgtgaagctgctcgcttgtgatgtctttaatgctttctttcggatgctgttccgcggcgttattcacgagaatatcaagacgcccgaattcttcaaccgttttttcaacggcttcattgcaaaagtcttcctcaccgacatcgccggggattaacagacattttacgccttcttcttccactcgtttttttgtatcttccgcatcatcgtgttcatcaaaatagacgatcgcgacatttgcgccttccttcgcgtaagcaaccgcaacggcgcgtccgataccgctgtcgccccctgtgatgagcgcggttttcccttttaatttgtcagcgcctttatattctttgtattcgtaaacaggcgccggattcatttcgctttcaatgcccggctggcggttttgtgattccgccgggaattccttcggatagttttccatgtcaagttcctccttctggttcgttgtcatatttcttgtctacctctgctgtcttccggataaacatgattgagacagttcaaaacgttttcggagaaaaatgtttcacatggaacgcaagaaaaaaacccggctggcagccgggtttttgttctctattatgaacgtaccgcttgtttgcggagcacgtcttttctcacttttccaaggttgtttttcggaagttcgctgacgaactcaatgtccggaattttaaaggcagcaagacgttcttgaaggaatcgggtcacttcttcttctgtcaggtcttctctgccgtttgtcacgatgaacgctttcggcttttcgccgtagagcggatcagggataccgacaaccgccgtttcgagaattcccggcacttgctgaatgacttcttcaatctggtcaggataaatattatcgccgccgtagatgatgacatctttataacgtccggtgataaagataaatccgtcttcatccacatagccggaatcgccggtatggaaccagccgtctttcagcacttttcgtgtcgcttcttcgttaccttcgtagcctttgaataaaaacggacttgtcacaacgacttctccaattgagccttgcggaaggacttcacctgtttccggatctacaacgcggacgtccacttcttccatcggtttacccgcggaagcggctttatccattcccatttgcggattccaagagctgatgccccacgcttccgtgcttccgtatccgtgcatgagcgggatgccgatgtcgagatactgctggatcaggctgcttggcacctttgtgcctcccgtcatcatataaacgatagaagacatgtcagtctggtgcgtttcccatgctttcagcaggtatgtgaaatagactggcagcgccatgatggtttgaattttttctttttcgatgagcttcaagttttccacagggtcctgattgtctgtcataatgaatgtcgttccgctcatcgtgccgaccatctggcagataatcgcgctcgtatggtaattcggatggcatgctaagaagcggacatgctgcattctccccgtgtaagccaatgtcgcgtttacgtagttgtatatgccgccgtgagtgatcatgcagcgtttcggattgccggttgtacctgaggtaaacatcagcaatgccgtatcgttttcagacaccgtttcgacatccggtgtatcaccggagcctgtcaataaagcgtcaaactcaggcgttgtctccgcagctgttcctgtctcgatcttcagtttaagagaagataccagcgcaggaagaacttcttccataatctctttaaattcagtgccgaaaaagacagctttcggttcacaggctgctaaaatgcctttcatttcgtaaggtgttaattgccagctgaccggcacaacaaccgcgccgatttcgagtgccgcaaacatgacaatggatgacgcgtggccgtttttgcaaagcatcgccactctgtcgcctttttttattcctttatcaagaagcgcttgtgcaagctggttgattcgttttcgatattccgcgtaggtcagggtatgcgcaccgctttttacagcttcgatctcttcgctatttgaaatgtcatgcagaatcatatgctgtaatgtctccatattttcatctcccataatcataaatcacaaaaaactctgtcagattttcttcctcacgcaacccattttaaaccaaaaaatataacttgtaaaacaattttgttttagaactattccattcgtgaatgatacaatagtcccatgtttttagtttcttcccttccccttaccctcatacatgcagaaaaaaacacaccccatatgaggtgtgcgctttctgtttaccgctgtcctttctcctgaatgaaatgataaaacagcttgtttaaacgtttgtataaatcggcttcatcctccgtctggaaggcttttatactgtcttcggactcgatgatggcggagctgaccgcacttagtatttccgacccttcagcgggcatatcagccggcgccatcatcaccaaagcgcggccgacggtcagggaatttccgtccatgcctttgacactgcatggagctgtcaaatcataaattttgaaaaaaggcgtgacaatttcttcatttttgagatggtacagcgccatcgccgttcccggaatgccgagtccgccctgtcgttcacgctctgcaaggcgctgtgcggtttgtttggcattacggacaaatccttcttgctcaagcatggcaaacaaacgattcaaaaacagttcgtacgccgtgtttgactcaatggatttgatcgaaaagttccgcagcacgctttggataaccgccgcataatgtgccatacggccggccgcttccagcatatcaggcgtctccggctgcttctcttctcttttaccgtttctttttttgtcaagaatcagcggaatttttcttttgatgtactgcttcacctgatcagcgtcttcttcgtttaaaagcggactgaccatgacgtaatcaatgtttccatacgggatcggaacggtggatacgatcatgtcatacgcggtgatgtctcggtccttcagttcgatgagggaagacatatcaaaggaacggatttccggaagctcctttttcagtctggatgcgagcattttggacgacccgatgccgctggaacagacgatcagcgctttgatcttcgcttcttcccgtttgatttccagagcggagccgaagtgaagaacgatgaaagcgatctcatcatcagagaaaagaagccccggaaagaatttttccattccttcttctacggccatgtacagcagaaagtagtcgcgtttaatttgctcggtcatcgggttgtacatgtcgatattttctttcacccggttgatcgcaggctccagatgggcgattaaaccgtcgtataaagaaccgttttccgtcagatcaattttgattttttcagaaatgaagccgatcagctgcttcgtttgcaaggccgtttcaacttcaatgttttccggtttgaattccgttttgtattggcggttggcgctccgcaaatgaatggtgatataaccgatctcagcttccggaattgaaacgccaaacgctttttcaagctcttttgccatttccatcgcagagccgtactccttcgtctgctgcagcgcttttagttccgaagcctccatcgtgatggtttctccgagtctgattcggtccatcgcaaaggttaaatgaaccgcaagcgccatgtatgagctgtcagataaggcgatcgcgattttttccttgagctgaatcaagagccggtccattttcaaaagttccgctttatttacgaccccgaacattttttcagcatcgtcaggttttcctttaatattgaattcaaccgcttccaaaaagctctgaatatcaagccggttgacgatgagattgccgacgattttccgtttcgcattttccggacccgtcagctgtatgccgaagcccctttttcggatcagcgtcaagccgaagggcgcgatccaggtctccagctcatccagatcataactgattgtcgcgtttgtcacttgcaattcgttcgccagactgtagagcttgatcggctcttgcgactctaatagtgaacatagaattaaaagtttccgctcctcagcgctgtattcatgctgttcataggacaggtctgacaggagtttttgtttgtcctccgggtttcctaccgctttcagtcctttgccgggctgtttatcaagtgccagaccgaatgattccatcatcggtttgattgtttttaactcgcggtgaacggttcttgtgctgacttgtaaagcttctgccagttcatgcactgtctcgtaacggttctgcagtaatagatgtttcattaatttttgttctctcgctgtcatatacatgaaacgcgcctccagattttctagttgtgagaagtatggcatatggggagtgctgccggggaaagtggtgtaaattataatataaaacgctttcaatgattattcaaccattttcaaatggcaatttggcactggaccgtgtgacagtattgaaaaagaaaaatgtgtcagataatatgccatgacgcttgttactcttgatccgcacggctatacttcaaagtgaccttacttgtttttagacattgcacaccacataaacaaacgcccggaagataccttccgggcgtttgttctgtttatggaatatcgcagccttggacaccggtataaatcctgaaccactgatcatggctgagtttgtacgcggatgcacgcaccgcggcggaaatgcggttctcttttccgctgccgacaatcggcatgatgtctgccgggtgggtgaacagccatgcgtacatgacttcgtcaatggaagcggcgccgatttcttcctgtacggaacgaagcgcggcacggattcggagggccttatctgattgtcctgtaaagacgctcccgcccgcaagcggtgaccacgccatcggcggaatgcgtttttccagacagaaatccagcgtgccgtcatgaatattttccagcttgtacgccgagatttcaatttggtttgtgacgagcggatcatccaaataggattcgagcattctgtactggtgcgctttaaagttcgataccccgaaatatctgaccttgcccgagcttttcagcgcgtgaaacgcttcagccacagcctccgggtccataagcgggtccggtctgtgaatgagcagcacatccagataatccgtattcagattcaaaagcgactgctccgccgacgctaagatgtgagacttcgacgtattataatgatgcgacttgtttcctggccgctccggtgattcaatgacaatcccgcattttgtgacgatttcgattcgctcccttattgaaggcgaaagggacaaagcgccgccgaacagcttttcacacgtataaccgccgtatatatcggcatgatcgaaggtggtgatgccttggctgatacaccattcaatcagattcagcagctctccgtctgaaacattccattcgttcagacgccaaagcccgtgtatcactcttgaaaattccaggtcttcagccaattgaatgcgctgcatgtgaaatccccctttttcttagagcctcttgtatctctgttttcaggaattgcccatgctgtttcattctgcttcggcggccgattttcctttcagcccgcaaaaatcgtcatttaatgattctgaaactgctttttcgctttttcaacgacgtaatggcttccgccgcgttttttgacgtcttgaatcatcatcgcgatcaagaggtctttctttttataatcgtaaccgacaaaccagccgttttctttgccgtctttatcttctttagacgttttcagctcggctgtaccggtttttccggctacggtaatgccgcttacggccggctgatatgcagagccgcgcggatcttcaacgacgcctctcagccctttcgtgatttcttcggcattggctttcgacaccacttgcttatgccagatttgcggtgttttttctccgtctttgatcaatgtcggtttgacgagatttccgtctgttacaaatgcggtatagtcagccgctaagtgcagcggagacatcagcatctgcccctggccgtagcccgtatctccgagaaggatctcggaatctagcttgccgttagcgattgaggacttttcaatcggaaattggtacggaatctcttcatcaaagccaaatgtttttaatccttttgtaaacgcgtccgctccggcatctatggcattttgcgcaaagtagatgttgtccgatgtgatcagcgcgttttcgagatccacttcattcaggcgctctgatacgcgtgtgacatggtaaccgccccagctcgaatctttctgccactcttttccggtgatttttttcttttccgatgctttcaatgtgccgtttgtcaggccgactgccgcggcaatcggtttaatcgttgatcccggcgcataaagtttgttgaatttcgctgaaaacggattgtttttatcttcattcagctttttccactcttttccgctccagccgaaaagaaagccgttcgggtcataagacggtgcgctgacgagcgcgagtgtctctcccgtttgcggttcgagggcgactgccgctccgctgtcatctttcatagaatcatacagcttcgtctgcgttttcatgtcaatcgttacatgaatatcctgcccgctttcggctttcttttcagcaatgacctcacctgtttgcgggacgtaaattttccagccggtcttgccgcgcagcttgtcttcatatacattctcaaggccggcgatgccgattttggaagtatcgctgtattggccgtctttcgcttttttcagctgctccgctgtgatggttttaatatagccggtcagatgggccgttttttcgccgtacggatagtagcgggagctgactttcgttttcgtcacgccgtctaatgcaagcaggcttttgaccttgctttcatcatccggtctgattttttgaatcgggacataggagtcgtcttttacccagccctggttcagtttgcttttgatatcgtcttcagaaaggtccagtttttcagacagtttttggatcacgctgtctttatccttgccgagttttccagggataatgccgatttccggcacctcggtattcacggcgagaccttttccgtctttgtcgtaaatttgtccgcgcttcggttcctcatttgcgatctgcacggttttgtcatcggaaagctgtttgaaaataaaagaaggattccagtcaatgttccatgattctccatcgtctgttttctcttttttcaggacggccgtgttttcaaaagcgaccttccctgcttttgtatccatgctgactttataatcgatgtgctggaggtcatcttttttcttatcgtcttcgtcctgtttttcggcagtgactttcagatttttgacccctgcttgttcataaatggtttcatatcgttttacaaaatcctttttggatcgttttttcttttcatcctgggtgaggctttggtacatcttatcgtaatgaccgccgttccagtcttttacgaaatctttcattctgtcttcggccgattccgttttcgagcagccgatcaaacctatgattcctgcgagtaaaagtaataggtataacccttttttcactgtcaattcccctgccttccaactgttattttctcctaaaccaaatcaggctggcaaggatttttttctcatagcgtttaaaatttttttgtttttccggccgtcacggcccatatttttatacaatgtatctattaaaaaaggaggaatttcagatgatcagagaagcagccatgctgtatgtaaaagaaggtcttgagggggaattcgaagaggcattccgccgggcggagccgattatcgcgggcatgaaaggttatctgtcccattccttgtccaaatgtatggaaaagacgcataaatatttgctgcttgtggaatgggagacattagaagatcatacaaaaggctttcgcggatcgccggaatatcaggagtggaaagccttactgcaccgtttttattcaccatttcccgttgtggagcattttcaggatctatcagactcagatcgcgtgaagcgtaaaaccgattaaggagatcgaccatacaaaaacggcggtatagatattgaatttcccggagccgtcgttttctttccgtttttcctccagccctgaatgaacatgaccgcaccgagaaacacgagcataaccggctgtatgacggaggtatgttccgcatacgtaaatgcggcggccgcaagtataataatcagcatcgcgagtgacagttttaaggcgcgcagcaaagcaatccatcctttctgttatcattttttgaacacaattctatttctgtctttatcccccattattctagcgtactttttgcgcggatagaacgaaagtcggacaattttaagtttgttttaaggagcacgaaaagcgcgctccccatgaaaaggagcgcgcggtttatgagcgggcgaggcttccgtatccgagcccccgcaggacgcatgccatgacttcataccccttgctgttggggtgtacgcggtcataagaaagatattcattcatttttcctttgaaagcgctgtggacgtcggcaattttgacgtgcggcgccgatgcgagtgtgctgaggtgcgcattataagaggatatccatttttctgcaatggagatgcccgggaaaggattgtataaattgaagacgcggatctcataaggagacgggtgcgacccttttaaggcagcaatcttggttatcatcttttcaaagttctcatggcagtgactggacacgctggtgaataccgaagcgtccgatgtttgctgatatgcctgaaccgaatcgatcaaatcgttgccgcagcctgtaatcgtaatcatatcagcagcctgaatccgcctctgaatgtacgggaaggacataagcccgagaatttctcccgtctcaaggcctgatttggcaaagatggatacgtcggttcttgtctgtaaatcttctgccatcatgcgcccgaaccgctggacaaaaccggcggaaaacggcccggatcccctccccgtcgtcaaagaatcccccagcgccgtataaacaagtcccatttactttcctccactcgttactatcgatattgtaatgtacgcgagtgaagaaaaattggctcggtcaataacctaatttctcagaaatatgctgtgcggcgtttttgaccttttcggttaaatacggcagcctgtcctctgaaaaccgggcttcgaagccggcgatgctgattccagcagccaccttaccttcgtgattgaaaatcggcgccccgatcgccgccgtataatcttctaattccgaatagctgatcgtataacctgattgcaaggatctttcaatggagtgaagcagttcagcccgatccgtcatcgtgcctgaggcgattgcggcaagctttgtcttctgaatgtatgtgtcaatctcctcttccggcagaaacgataaaatgcttctggcgcaagctcccgcgtacagcggcgaccggcggccgattgccgtatacaggcggacggtttgggtgccttcaattttttcgacgtaaatggcttcatccccgtccctcatgatcagctgaacggcctcatccacttcgctgcacagctcttccataatcggtttggctattttcctgatatccagacgttcagagacgagctggccgaattgtaaaaagatcagaccaagctgataacggccgtccgccgcccgggtgagaaaccctgtttcctccagtgagcttgccatccggtgaaccgaagtcttcggcatttccgatagagaaaccagctcatttaagctcaggctcggttcagtgagaaacaaatgaagcagttccattgatttgatgacggttttgtttttgttttccatggtctttagcccctttgtcagatcagccattccattttgagccttgctttcagctccttcagctgctgttccttctccaaaagcagcatttccgcttcctccagcgaaacggcccggaacgtaatatgttcccccggcatcgtttgggcgacgaggggaagatcggcggatatgatatgcgccattcgcggatagccccccgtcgtctgtctgtcagccagcagaataatcggattgccgtccggcggcacctgcaccgttccgaacgtcacagcctcagataccatttccagcggctcccgcaattcaagcggagcgcccttcagccggtagcccattcggtcggattgaggcgtgaccgtatatgactcttgataaaaacgtaattttgcttcttctgtaaaagcgtgaaattgagcgccttcaagcactcgtatgaccggattttttttcagcggcagaaaccctctgctgctgacagaccaatcaggcgctgagaaaccatactgtccgaaagaatcgctcagacggtacgcgattgattccgaacatggcgtcatacggccgagcggcagctcatcatctttttgcagcgctcttccgcaaaagccgccgatccccgctctgacatacgtgcttttgctttccatgacggcgggcacatcaaatccccccgcgacggcgagataagcgcggctccccatcttgcacggcccgaatgagacgacgctgttttcctttatcaaaaccggtttccacagaggggcgggctccccattaatatgaaaggcgaaatccgcccccgtaacggcaataaccgcgggttctgagaactcaaaggaaggccctggccccataagcgtaacttcaagccccgcctctttttcttgatttccggcaagaagattggcgatgcgcagagagatcgtatccattgcgccgcttcccagcacaccgtatttctgatatcccgtccgccccgtgtcctgaaccgtcgtcaagagaccgggttttaccactttcatactcattcggctccctccttgatgcggctgtactcctctgctgtgatccggacgaatttcaccgtatcacccgctctcaatagactcggcggatgttcttccggcctgaaaagccggagcggggtgctgccgatcagctgccagccgccgggagtggatatcggatacacaccggtctgcattcccgcgattcctactgaaccggccgggatggacggccttggcgacgcctttctcggcgctctgatccgctcagacattccacctaaaaacggaaatcccggcgcaaatccaagcatataaacgagatattcgccttcagtatgaatgcggatgacgtcttccggggtcagatcgttcatttcagcgacctcttctaaatcgggaccgaaatctccgccgtagcaaacggggatttccatcacccggcgctcttttttgcggccggtcattatatggctgagacgttctgtcacttctttcttgaccagggcaaaaggagagacgcctttttttatgtttgagacggcagacacgtcataaaagaccgttaagcttgtgaatgccggaatacattcaacgaagcccggaaacggccgttcttccatacaggctgccgccgcctgcacccggctgttgacctcttcgctgatgtgcccgccaaagcggatgataacggcggaatcaccgtacggctgtatatcaagcgctgtatttccgctatactgcatcattgtcatcacctcgttgtattctttctcacttacaggacagcaagcgattcattttgtatatcggtgatcagcatgtgccccggtgaatgtgttattacgatatcaggctttgcttccatgatcaccgcctggggtgtaacgccgcaagcccagaatacgggaacttcaccttcccgcaccgttacggcatctccgaaatccggctgatgcaaatcgctgatgccgatgctttgcggatttccgatgcggacgggggcgccgtgcacggcgggaaaacgtgacgtgacctgcgccgcgcggactgccagcctttccggaatcggtctcatgctgacgaccatttttcctgaaaacgggcccgccggaatacagtcaatatttgttttatacatgggaacgttcacgccttcatcgatgtgcctgatcgggatgtgctgattaataagggcctgctcgaatgaaaaactgcagccgatcaaaaacccgacataattatccttccaatacggcgtaatatccgttacctcttcagtaagcacgccatgccgataaatcctgtatttcggaaagtccgtccggatatcagctcccggcgccgctattgccggaacgggtgaacccgcatccgtcacatcaagcaccggacaaggcttttgattacgctggcagaataagagaaaatcaaaggcaagatccttttgcaaaacgacgagattggcttgtgcgtaagaagcggccaaccccgccgtcggcccggtcatctgccctttcctgataagctgtctgacttcttcgggactcatatcactcatatggtttttcatatcatcagctccatagctgcggcatttgcgagaataatgtatagatgcccataaccgccatgacaaccactacgatcgcccctgcaatcgtgagccagatcggatgcttgtaatcgccgacgatttttttcttataggcgcccaacagaatcatcgctaatgcaagcggcagaattaagccgttaagcgaaccgaccgcgaccagaattttggcaggctggccgatcgtgacaaaaataagagtggatacaataataaaaccgataattacgccatgtgagtgcttttcgatttttgccgaaaacgatttgaagaatgacaccgatgtataggcggcgccgatgacagacgtgatagcggcagaccacatgatgacgccgaaaattttatagccgacatttcccgccgcaagccggaatacagaagccgcgggattatcaggatcgatgcgcaggccctttgaaacgacgccgagcacggcgagaaacagggcaatccgcataacagatgtaatcaagacgcctgtgacggagcttttcgtcacctgaggaatgacttccttcccttggatgcctgaatcaagcaagcgatggcctccggcaaatgtaatgtatccgccgaccgtgccgccgacaagcgtcacgattgccagcacactgatatgatcaggcataaaagtttttacaaccgcgtgtccgaccggcggacccgtcgttacggcaacatacaccgtcaatacgatcatgacgattccggcgatctgcataaaacggtccatgacttttccggcttcctttatgacaaaaatcagcaccgcgaccgctgcgctgattaaagcgccgatctccggtttgattccgaataatacttgaagaccgagacccgcgccgccgatgtttccgatattaaacgcaagtccgccgagcacgaccagaaaagcaatggcataaccggcgcccggaagcaccatattggcaatctcttggccgcgctttccggaaaccgcgataatccgccatacattggtttgcgcgaaaatgtccaaaataatagaaattaaaatgataaagccgaagcttgccgccaatgtattggtaaacgtggccgtttgcgtcagaaagccgggcccgattgatgatgtcgccatcaaaaatgtcgcgcctaaaagaagcgaccatttgccggaagcctttccggctgtttttttcttttgctccatgctgtcttcctccctctgctgctcagtcttttgcaagcgcgctgatttgaatgtctgccgcttttaattcttttttgattgtttttgcgaatgtcagcgcgtgggcgccgtctccgtgaatgcagaccgtgtccgctttcaggtttacagcttgtcccttacgtgatgtcaccgtgctgtctttcaccatttgaatcacttgaccgaccgcttttttgtcatcctgaatcagcgcatccggctctgaacgcggcgtcagcgtgccgtcttcctgataggtgcggtccgcaaacacttcgcttgccgtcctcagtccgattcgatctcccgctttaatcagctcgcttccggaaagcccgaaaagaataagcccgggatcaaaatgacagaccgcctgagcgatggcttttgacaggccgggattgacggcggccatattatataaagcgccgtgcggcttcacatgctgcatctcgacaccttccgcttttaaaaaccctgacagcgcgccgatttgatacagcgtcagatcatacgcttcctcgggcgtaatcgcgatctgccgccgcccgaatccctgcagatcgaacagcccgggatgagcgccgattttcacgcctttttccgccgcaagcgcaaccgttttgcgcatcacgctgggatcacccgcatgaaagccgcaggcgatgtttgcagatgtcacataatccaaaatctcttcatccagtccgattttataagcaccgaaactctctcctaaatcacaattgatgtcaatctgaaacataagctccctcctgtattgtaaacgttttattttattatcattccgatatttggaacgactattccgaattgttggatttctcttcattatatttaattctgacaagtttgaacatccttttgtcagaaaacctaccatggacctagtcacaaatctgacaaaacaaaaaaagagagcctcatgctgagactctctcttttttctattataacacccagtggcggatcgctttggcgaccccgttttccgtgttgacatcagtcacccagtcagctgtttctttcacgatgtcctgcgcgttccccatggcgacgccgacacccgctttttcgatcatggcaatgtcattcagactgtcacccatggccatcacattttccatcgtgaagccgagtttttccgataccttcgccagcgcagccgctttgttgataccgagggcattgacttcgatgttgatcggacttgagtttgtgatttcgagctccttgtattccttgagctctttcagcacctcattccgcacttcatcatcctcgatttcgaacccgaacttgagccactgatgatccgtaatcgtttccgggaattcccctctccacactctatcgacggtagaggcccagaaattcgtgttgtgcttattcctcagatcccataatttttgaatatgatcggtatgaagaagcttgcgctcaaccagctcaaagttggaatcccagatttcgctgccgtttgccgtgattaaaaaggatgacagctcgagagactcagccagttcgcggcaggtcatcagcgtgcgtcctgtgctgatgacgacgtgaattcctttcgcctccgcttccttgatcgcccgccggttttcctccgggatgagctgctcgtcattgagcagggttccgtccatatcaatcgcgatcagtttaatatctgcgtcttctctttgtatcggcatatatgtacctcactttttatattgtagtcgtctctattttaatacatatgacccacaggaacaaaaaaccgcttcctgcgtttggcggggcgagcgttgaggaaaagaaatattgaggtgatggaggatgaaagaaagaaaacaaaagaacaaaccgaatgaaaatcctgaacatcatgatttaacggatccgattccgctggaagagctgaaggaaaacgccaatgacgaaaaacacaaacatgaccagagggacaattcacaaagtgagagagattatgatacaaaataacacgcttgtccgaaagccgccggtggaggcggctttttttacgatggctggataaatatgctgagctccgcttccgccacaggcttcccggcaacggacgctttcgcccggccgaacacaaaaccgcgtctgattcgcgtgacctcaaaaaaaagatccagacggtctcccggcaaagcggcacctaacctttccgctttcttcaccgcggataagagaccgagaccgtcaccgccggtaattcccgcgcaagccgccgtttgggccattgcttcaacgacgagcgaaaatggcatctctctttggtattcagttataaaccagtcattttcactgatgtttttgtaagcagccgcccattttccggcttcactgttcgtcgtgccgtcaatcaaaagaaacggaaaacgatggggcaatagcttctgattcatcacgcagcctcccttccctctcattataacgcaagaaaaaacccgcgtcccccgacgcgggttcatttttattgattgagctttttgagcacgatgccgtgcagcggttcatgcggctgaataccgcaaatgtcttgaagaacgccgctcgtgcctttttccgcgataagcttttgcagctcaaccgcttccggatcatcctgatagtcaaagcgcagggcggcggcgataccttccgccagcgcattcggttcttttatttttttggccggccctactaatctgtcattcgctccgagttttctgagcggtgatctggcgactcttgtcacatcatccgtgatgtattcattatcaaagcggctgatgattttttcatgtactgctcgtgttcggcttgcttaaagccgtacgctttcaccaagtactcgcccgtttctgaaagtgcatcgtacacgacacgccggatttccggatggccgatggcctctttgacggtttttaatccgcgctgatagccgacatacgccgtgacggcatgcccggtattgacggtaaacagctttctctcaatgaaaggcgtaagatcatccgtaaacaacgcgcctttaagtaccggctgatcgccggcaaagccggttctgtctatgacccattcaaaaaacggttctacggatactttcagcggatcttcatggtgctgaatcggcacgatccgatctaccgcagaatccgggaagccgactgtccggttcacgagttcccgctccgcttccgtcaaatgtccgaaaacttcttttttcagaaaactgctgccgccgatcatattttcacaggcaatgatattgagaggctcagaggacgttctgcgcttcagaccttccgcgatggacggggcgatgagtctgagaacgttcgggcccaccgccgtcgtaatgatcgccgcttcattgatcagcccgtacagctcttgttcttgcaccgcgctgttgatggctgaaacggggccgatgatttctgtctgcctgccgccgtcggcaagctccacggtatattccttcttttcattgagaaggctgaccatcgtttcattcacatcagcgaaaactacgtcatagccggaatgatggagcagggcgccgataaagccccgcccgatgtttcccgctccgaaatgaagggcaatcatgtcagttcacctcgctgaaaatagcggccagttcttcttccgtctttgcattgatcagccgttcgatgttttcttcctctgagcagatgatggcgatgtttgacaggatgtctaagtgttcattgttttttccggcgataccgaaaacgacctttgccgtattgccttcaccgtattccacaccattcggaatctggatgacggaaatgcctgaatgaagcacctcatccttcgcatcttctgttccgtgcgggatcgcaatgaaatttcccataaacgtggatgatgtttcttcacgttcgaacattttttccacatagccgttcttcacgtaaccgttatcaatcaacgtctgtcccgccaggcggatggcatcctcttttgagttcactgtctggttcagtttgatgttcgctttagccaatacttccatgatgaagatccctctttctgtttgattagtttttaagcttttcaatcagttcatcgtatttcgggctgtttaagaaattatcaaccgaaatgtgcaccgcctgcggcagcttcgctttcgcgcggtcagtcaggtccttatgcgtaatgacgatatccgcgtcattcggaagattattgatcgacgtatttgtcacatcaatatccaggtctgcttttttcactttgtttcttaaaatggaggcgcccattgcgctcgatcccatacccgcgtcacatgcgaagataatgcggctgacttggtcagcggaaatatcagcggcgctgttttccggctcttcctctttgtctgccaatgcggccgccgcttcacttttcctgcctttcatttcctgcattttttccgccgcggctgtcaaatcttcttcgcccgctttagacgatttcagaataagcgccgagacgataaacgatacggccgcagccacgatgacgcccgccagcacgccgagatagcttcctttcggcgtcagcgccaaaatggcgatgatgcttcccggagatgatgcggcgacaagacccgcgttaaagatcgagaatgtgagcagtccgctcgctcccccggcgatcgccgcgaggatcagcatcggtttcattaaaatgtaagggaaatagatttcatgaatcccccgaagaaatgaatgatcgccgctcccggagctgtcgatcttgaagagcctttcccaaagaacatataggccagtaaaataccgagtcccggtccggggttcgcttccactaagaacagaatggattttcccgctttggcggcctgctcgattccgatcggacttaaaatgccgtggttgatcgcgttattcaggaacaggactttcgccggctctacgaaaacgcttgcaatcggcagcaaattcgcgtgaacaatgacttccacacccgccgccagcaatttgttaagagacaggacgaccgggccgatcgcataaaacgcgataatcgtcagcaccgcgccgataattcccgccgtgaagttgttgatcagcatttcaaaaccctgtctgactttatctttaaacagacggtctaattgtttaatgagataaccacccaaaggtcccataatcattgcccctaagaacatcggaatgtccgctccgacaatgactccgatggcggccgtcgctccgacgactcccccgcggtgatcatagatcatttttccgcccgtatatgcgattaaaagcggcagaagatacgtaatcatcgggcttaccaatgtattcagctgcggattcggaaaccaccccttaggtataaacagcgcggtgataattccccatgcgataaatgcgccgatattcggcatgatcataccgcttaaataactgccgaaccgctgtatcttcactttcatgccagcttgctgttcttgctgcatgttcattccctccctgtttgcctgccttcagatgaaaataaataagacacggggtttctctctcccctgtgtcttcatcataaaacgcttacaatccccattcaatgaaaagtaaagaggagtttggcacagagactgtgacaaatccttaacaaaaaaaagacacctcatcaaaggtgtcttaccgctttctgtatataatgtgtccttttgtgacgacgagcttggcaatgagccgctcactgacaataaacaccggatacgcacatacgagcgcgaaaatggcggccggcacataccgcgctgccggaaacatcggcatgacggcggttctggccatctgcacaagataaatcaaaagcaccgtgatcgcaatggccgcagccataatcggagctgatactttatattcacgcaatttcacatggcaatgcccgcactgaaactggcacgggatcatcgatgatctgaccatgtcgcctgtaatcggcttgccgcagttcgggcaggtcgtttctttcatgtttattcctccattcaactcttctattataacagagtctgactgcgtgttttacatttgtgattgttcaacattttttcacatattttatcatcaggctcttgtgtgcatttgtgaaaacatctactcttagagggaggttcatcactcattcgcataaaaaggaggatgcagaattgcttccgattcacagacagcaaaccttgcttgaatggctgaaagaagagggcgcgctgaaaatctctgacataagcgagagattcggcgtctccgagatgaccgtgtacagagacgtcaatcagctggcggatgcaaaccggattatccggacacccggcggcattacgctccctcccgcttcagaacgaagcgccaatcaatgcggctattgcctgcggccgattcagcattcgtattctgttcagcttattaccgtttcacaaaccgttgagcagatgtgctgcattcattgcgcgattttgcggtatgaggataaaaaggatgaagtgtcccacgtcatttgtaaggattttcttcttcagacgacgctaacggcagcttccgcatactttttagtccatgccgatattgaccttcactgctgccggcctcaggcgattcccttctcaacgcttgattacgcagaacggtttcaaaaaggattcggcggggtcatttgcacctttgacgaggcggcggacatcatcttacacgacaggcagaagggatgcacctgcagcaagacataacaacaaccaaccggaaggcggtgtcatcatccatgagacagaacaaacgctggctcgtctttttgctgttccttgttttgattccgaaaacaagcttcgcccacgcctacatcacaaactcaaatccgggtgagaacagcgaattaaaacaagcgccgaagcagattgaaattgagtttaatgaacagattgaagaaggcttccactccattaaggtctataattcatccggtgaacgggttgacgcgggcaaaacggtgattcaaaaaaataatgcccgcatcatgaccgcggcattgaaaaaaaatctgccgcatgatatttacagagcggaatggaacgcggtatcggccgacggacatccggtatccggcgtcatccctttcagcatcggaaaagccggcggagaacttcaggagcagacatcatcgcaagcggcgcttcatcccgaagcggccatcgaccgcggtattttgtacaccgctctctccctgtttatcggcacggcttttttccatctgttttggtacagaaataatgaagattcatcaaaagcaaaacgaactgtaaagctgctcgtgatttctttatgtttaacggggctcgcgctcgtgtgccagctcccgatccagacgaaagaaaacgcgggcggcgcttggagcgccgcgtttcagccggactatgtaaaagaaacgcttctgaaaacggcaggcgggtacgtctggatgatccagatcagcttatttatcctgctcgccctgtccatgatcccgctgctgaagaagaaagcattccggtcatttgcgtactggacggcgccgctgttattcttcttcgcttcgcttttggcaaaagcattcgccgggcatgcggccgttatcgacgaaaaagcggtcggcatcgcaatggactttctccatttatcggccgcgtctgtatggatgggcggtatcgccgcgcttgtgctgcttctttcatcagagtggagagaacccgataaaaccatcgcttgggaaacggtcagacggttttctccttgggcgttcgcctctgtcggcgtgctgttattttcaggagtgctgaatggatttttcattatccgctcgttcgattcactctttcacaccgcttacggcaagacgctccttttgaaaatcggactgtttgtcatcatgcttgcgctcggcgccgttcacgtatggatgacgaagttcagcagaaaaaggagcatcagcgcaacgataaaggccgaatgggcactaggcattgcggtgttattcacaaccgccgtcttcacaagcctgcccagtccgcctccgcccgcgccattgccttttaacggctcagaaacgatcggaaacggggaaaccctatccttgcacattacgccgaaccagccgggtaaaaatgaatttcaagtcattgtcaccgatcataacggcagcttagtaaaagacattcagcaatttacggtcactgtttaccagacgggcttcagcggcaaacagcatgaaagcacctttgatttgaagaagacgaaggaaggcacattcgaagccgccaacctgtccatcaccgaaaagggaaactggaagatcaaagtccacggactgacaaacgattttaatgaaatcaaccaaatattctcaacgacaaactaaggagtgtatctcatgttgaaaaaaaaagctttaatattcatatccgccgtgaccctgtcactcgtcggttttacggctgcagcaagcgcccacgtctcagtcaaacccgcggaatccgcggccggttcttgggaaacgtacacgatgaaagtgcctgtggaaaagaatgagccgacaacgaaagtcgtgctgaaaatgcccgccggcgttgaatttcagcagtatcagccgattccgggctggaaaacatccgtatccaaacatgatgacaaagcggtctccgtcacttgggaagcaaaggacggcggcattcagcccggccaattccagcagttcacgttcgttgcgaaaaatcctgaaaagagcggagatgccgcttgggacgcttaccaatattacaaagacggcagcattgtagaatggacgggtgatgagaaagccgacacgcctcactcgattacgaaaataacgaaatcggcgagcgtgacggatgcgcacggagctgaacagtcaaacgaagaaagcaaatccggcgtatcagcgcttgatattgcggccatcgttctgtcagctgcggcaattatcctttccatcgcggcgcttgtaaagaaaaaacgtgtgtaagcaaaaagcgatccggctctaaagagcctgcgatcgctttttttcttatccgcggcctgcctggaaagacggatatttggtcattcccccgtcagcaaacagcgtaatcccggtcacatagcttgattcctttgaagcaagccagacggcgacagccgcgatttcttccggctcaccgatatatcccatcggaatcatgctttccacatcttttttctgaacgggatcggcaaatttttccgcgttgatcggcgtattgatggcgcccggcccgatgttgttgacacggatgcgcttcggcgcgtactcaagcgccagcgtttccgtcatcaatttgatgccgcctttactcgccgcgtagtggacaaacagcggccacggaatcatctcatgtacgcttgacatgttaatgacgtttccttgaatatcattctctacgtaatatttaatggcttcgcggcttcctaagaaagcgccggtcagattggtattgataactttgttccagtctttaagcggcatttcatgcgactgaaccggattttccatgccggcgttattgatcatgacatccaatgtgccgaattccttcactgcggtctgcacgatgtttttgacatcttcttcttttgtgacgtctccttgaacgatgaccgcttcgcctcccgctttttgaatctcttctttaacggtttgggcgtctttttcattactatagtagttaaccacgactttcgcctgctcctgtccgaagcggatcgccatcgcttttcctaatcctgatgaagctcccgtaatggcaacgacttttccttttaaatccgtgtacatgttcaaacctcctgcatatgttatgaatttgatttcgcaacgcctaagaataccgcggctacaatgatcaggataatcccgatggcaatggcgaccagctgacgcttcgttttgctctcacggagaatgaagattccgccgagcgtgctgatgacgatccccatttgagagagggaaaaacttgtcgcaactccgacgcgcggctgtgagatgaacagaaacatgttcccgagcgcccagatgattcccggcagaatgttcttgagggcgtacttattaaacggtttatgcttgtacgtcaggagcagtccgccgatgaccatcccgatcgcctgcggcagaagcgctgaccatccggatacaccgaacagccgggcgacgacgacatagaccaaatagccgagcgtggagatcagcaggatgacaatgcctttttttaagtttcccggttctccgtccgcccgcccctttttatcttctaaagatgtgagcacaatcccgatgatgataaaaataagggcgagaatacccagcgtaatcgcgatcggggttgaccattctttgaatacgatcacaccgaacaaagaagtcgagacgagctgcattcccgttgatatcggcatcgtttttgaaacgcccatcagctgtatgcttttaagctgattgctttggccgagcgaccaaaacagccccgagatgatgccgacaataaaaatgcgcccggacagcaccggatggacaaacagatacagcacaaacgaaacgatgagcgccccgattgtcgttcccagcgtctggctgtaaggcccgccgcctaatttgacgttaaataacacgatgctcccccaaaataaagccgggagaagagccagtaatatatccatgatggcgaccttctttcaatcgtatttgctgttattttgtctggaatcgaaccgattattcccgcaagatcaaaaaagcctgccggcgatattcaccggcagaccgctcaataaaaaagccccgcttagaagcggggctttcttttcggctcattaaagtccgatagacatgtatttggtttccaggtacggttcaatgccttccgtaccgccttcacggccgatgccgctttctttcattcctccgaacggcgcttgaaccgcggacggaccgccgtcattccagccgatgataccgtattcaagctgttcagaaatatagatgccgcggcggtagttttctgtgaagaaataagccgcaagcccgaacggcgtatcgttcgcaagcttgatcgcttcatcaatatctgagaacgtaacgatcggcgcaaccgggccgaatgtttcttcatgcatgatgttcatggatgtatctacatttgaaagcacggtcggcgtcacgaaatagcatcctttttcgtcgttttggtcatacgttccgcccgtcagcacttctgcacctttttccacggcgtcattaatttgcccgacgattttatcgaagccttttttgttgatgacagggccgacgtttacgcctttttcaagaccgtttccgactttgagtttcgcagcttcttcactcagttttttcgcaaactcgtctttcacggattcgtgtacgatcagccggttcgcacagacgcaggtttggccggcatttctgaatttagaggccattgtttgggctaccgccagatcaagatcagcgtcttcatccacgatcagcggcgcatgtccgccaagctccattgacatatgttttacggtgtcggcgctgtttttcatcaggattttgccgacaggcgttgagccggtaaaggtaattttacggattttcgggctgctggtgaagacgtttccgatttcggctccgtcaccgatcaccacttgcagcacgtccttcggaattcccgcttcatatgcgagacgcgcaagggcgtaagcggaaagcggcgtatcctccgccggtttgatgatgaacgtacagcctgccgccaaagcgggcgcggcttttcttgtaatcatcgcattcgggaaattccacggcgtgatcgcggctaccgggccgaccgcctgacgggtgacgacaatccgtttgcccgttgtcggcgcaggtacggttctgccgtaaatccgttttgcttcttcggcgaaccattcaatatagccggcgccgtataaaacttctccgaccgcttcttcgtacggtttgccgttttctttcgtaattaattccgcaagttcttctttattttcaacaatcagctcataccattttctcaaaagtgaggcacgttctcccgctgatgttttggaccatgattgaaacgcttgatgtgaacgttcaatcgctttttcaacatcttcggccgtctgctgggggatgctttcgatcgcctctcccgttgccgggttgtacactgttaattgttctggcatattgaacattcctttctttcctatagtaaaaccattgaatgcttgttgatgtatctcacactttcatgatagcagacacatccggcgggattccaataattgaactcacagagctgcttcgataatggaaaggccttctttgagctgctcatccgtcacgacaagcggcgtcaggaatcggataatgttgccgttaatgccggccgtcagcagcagcagtccgttctcgttcgccgttttagcgatcgccgcggcttttgctttgtccggttcccgcgtgtacggatctttgacaatttcgatggccgccatcgcgccgagtctgcgcacttctccgatgcaggcatgctcttttttccactcgatcgcttgatgctcgatgatccggccgatctcttcggaacgctgattcagcccttcttcttcaataatatccaagaccgcgagcgcagccgcacagccgagcgggcttcccgcatatgtgccaccgagttcccccggcgcggcggcatcaagcatttccgcccggccgatgacaccgctcagaggcaatccggccgcaagtgatttggatacggtgatcaaatccggaacggcttcgaaatgctcaatcgcaaaatacgttcccgttctggcaaaaccggtctgaatctcatccgctacaaaaacgataccgtgttttttacaaaaagcggcgacgtgctgcacgaaacgttttgaaggaatgatgaagccgccttctccctgaaccggctccattacgacacaggcgacggtttccggtgcgactgcggcgataaagaaatcctcaaaagcgctgatgataaagtcgtcatactgctcgtcgctcatgccggccggcttttgataatagtaaggaaacggcgcttgatacacctctgaggcaaacgggccgaaaccgtatttataaggcttcaccttgctcgtcatgctcatcgtcatgttcgtgcggccgtggaaccctcttgtaaatgacacgacagcctggcgcttcgtatattttctggcgattttcacggcgttttccaccgcttccgcccccgaattgagaaaaatcgcttttttcgcatgatctcccggcgcaagggcgcaaagtttttcggccagctcaatataagacggatacatcatgacgttaaatcccgggtgaatcagatcctccgcctgtttcttcacggcctccaccactttcggatgagaatggccgacattcagcgttccgatcgctccggcaaaatcaatgaatcgtctgccgtccaaatcgtacaaaagcgccccttccccttttaccgccatgctgcggtttccgttgccgacccccttggaaacgaattggtcccgtttttgctgccactgggcagttgtcacttccgatgatgctgttcgactcatagattccatccccctatattgttttcttatcattctgacttctttttggtatgatgaaaagtaccaaaatcaatttatccatggtatcagaaaggagcagggtctggatgctgacgatttccattaatcattcggaaacggcggattatatctatcagcagatctatcagcacataaaagcggccgttttgaaacgcagcctgatgcctcatacaaaggtgccgtctaaacgggagcttgccgagacgctgaaggtcagcgtgaattcagtgaattcagcttatcagcagctgctttcggaaggttatttatatgcagtcgaaagaaaaggctttttcgtggaggaaattgatacggtttatcatgaagaaacgccttcgctctcattgcctgaagatttaaaagagcgggagccggataagagcggctggatttcgttttctcatatgagcgtggatacggcgcattttcccctgaaaagctggttccgctgtgagcataaagcagccgcccgttcatttcatacactcggggaactcgtccatccgcaaggcttatatgaagtccgtgaaaccatttcgcggcttatttccctgacaaggggcgttacatgccgcccggaacaaatcgtgctcggggcgggcacgcaaatgctgacgcagctgctgacggaactgctgccaaaagacgcgctgtacgccatggagaacccgggatatatgaggatgtaccggctgctgcaaaacctcgggaaaaaggttgcgacgatcagccttgatgaaaaaggcatgtccatggccgaaatcgaaaaacgccggccctgtgtattgatcaccacgccttcccatcaattcccctcaggcgtgatcatgcccgcttcccggcggattcagcttttaaactgggccgccgaacagaacggccgcttcatcattgaagatgattatgacagtgaatttaaatatgacgccgatacgataccggcgcttcaaagccttgaccggtttcaaaatgtcatctacatggggaccttttcaaaatcccttttcccaggtctgcgcatcagctatatggttctgccgcccgggcttttgcggacgttcaaagagagagcgtatgacctgcatacgtgcagcacgcttgcccagctcgcgctgaaagaatttatcgactcaggtgaatatcagaaacatattaaaaagatgaagcagcattataagaacatgcgggaacgcctcatttcggctttagaagaaatattcggagaaagaatcagtgtaaagggcgccaatgcggggcttcattttgtcactgagtttgactgcgcccgttcagaaaaagagattttggcacgggcggatgcagaacagctcgatctgtttgcgatgagccggttccgtctgaaagcaggaggcgattcaaataagccgcagctcattctggggttcgcccgcctgaaggagagcgatattcaagatggcgtcctcaggctttaccgggcggttttcgacgcataaaaaaacccccggaattcggggacttatttaccagcggtccggttctgtctgcaaaatcgcctccagcaggccgggaaacgccgcttgtaaatcatctttgcgcagggaataataacggtgcttcccgtctatgcgcacttgggcgatccccgcttcccgcagcactttgaagtgatgggacagcgttgatttggcgacccggacatcagcgcaggtaccgcacgttttttctgttgtttccgccaattgtttgaccagctctaagcggagcggatcactcagagcatgaagaacctttgtcagctgtaagcggtcggtttcaggatggtttggaatgttcatgagtcaaatgtaacacataaaagcggcgggtgacaatttaggcggtgagggtttttcctttaccattcactgcgaaacatgttacagttagttcgataatattcgaactataacaaataaacccaatcaggaggaataacaatgatcgtcttacaggcttacatgaaagtaaaagcggataaacgcgaggaatttttaggagaagcacaatcacttgttcagcattcacgcgcggaagaaggaaatgtgcaatacgatcttttcgaaaaagtcggtgaggaaaatacattcgttatgcttgagcaatggaaagatgaagaagcgatgaaattccacaacgcaactgaccatttccaaggattcgtggcaaaagcaaaagaagtgctgagtgcgccgcttgacgtcgtccgcacagaactgtcagagtaacgaaaggatgaatgacatgaacgaagtccttcaaatattaacagaccaccgttccattcgcagctacacagatgaacccgtatcggatgagcagctggaccttatcatccaagcaactcaggcagcgccgacttccattaacggccagcaatttaccgttattgcggtgaaagataaggagcggaagaaaaaaatatccgaattggccggcggccagccgtggattgaccaagcgcctgttttccttttattctgcgctgattttaaccgcgccaaaattgcgcttgaagaatataatgatacaccgcttgagatcacgaacggtttagagtccgttctagtcggagccgtagatgtcgggattgcgctgggtacggcaacggctgcggctgaatcaatgggactcggcactgtgccgatcggcgccgtgcgcggcaagcctgacgaaatcattgaattgctgaaacttccgaaatacgttttcccgatttccggtctcgtcatcggccatccggcagaccgctccgcgaaaaaaccgcgtctgccgcaagcagccgttctgcatcatgaaacgtatcaagaagaagatttaagaacccatatcgaggcctatgacaagcagatgtccgaatacatgaaaaaacgcaccgacggacaggaaacaagaaactggtcacaaggcatcacttcctactataagcaggtttattatcctcacattcgtgaaatgcttgaaaaacaaggatttaagacggataaataaacgtatcagcctgtcggaacactccggcaggttttttctatttctcaaacaaaagcgttgacactatgtaaaaatttttgttaatattttcatcatatactcattggttttctgtgaaccgatgggttttctattgtgacgaaagaaggaatctgggcttatgaatgataagaaaacggatattctgctggcggcaaggaagcttttttccgggaaaagcttttcgtcggtctcgatgcaggcgatcgcagaggagtgcaaagtctccaaagcatctttgtataagctgtttgaatcaaaggaagacctgctcctggagctgctcgattttaaccagaaacagatggtagcggccgcttcattattaaatgaagaaacgagcctctcccctgaggaacggtttgccaaaaaactgatggctgagcttgaaggcttcaggcgcaaccagcagttttttaatatgctgatgtacggaagcccctcttccattaatgagcgggtaaaacggcatattcacagggcccgctccacctttatctgctggcatcgcgattcactgattcagacgtacggcgaagacattattccttatgtatgggagctggtgatcgtcctgcaggggctcctgagagaatgcatcacgctgattaagctggaaaaagaaccgctcgccctggagccgctcacggactttatcatccgccatctcaatctcatcgtcgaaaacaggaaaaccgaaacggctttgcctcaggagatgattgacctttataccgcctccgcttcctcatttgagccaaaagacaaaaccgtattgctggctgaaagcctgaaggaactgaaagaagccgtctcagcccttccggaggaaaaatatgatgccgcaggactcgcttccgcggcggttatgctggagaaagaatcagcggacaaacagccgcgggattttcttataaaagcgctcatcggttatttggagcaggccggaccgctgcaccagccgcttgcagccgttaaaacattgctcaaactataaagaaagaaggaatcagcttgaataagagtattaaaactgcaccatacaaccgctctgtcattgtcgggattcttttggcgggagcgttcgtcgccattttgaaccagacactgcttatcacggcgctgccgcacattatgaatgacttcaatatagatgccaacaaagcgcaatggctgacaacgtcgtttatgctgacaaacgggattttgattccgattaccgcatttttaatagagaaatttacgagccgcaccctcctgatttccgctatgagtattttcacggtgggcaccattgtcggcgcattcgccccgaactttccggtgctcttaacggcccggattattcaggcggccggcgccggaattatgctgccgctcatgcagacggtatttctcacgattttcccgatggaaaagcgcggccgcgccatgggtatggtcggcttggttatttcgttcgcgccggcgatcggcccgacgctttccggatgggcggtcgaagcattctcttggcggtctttgttttatatcatcttcccgatcgcagtcatcgatttgcttttagcgattattctgatgaaaaacgtcacgacattacgagaaacacagattgatattttatccgtgatcttatcgaccctcggattcggcgggctgctttacggcttctcaagcgccggttcctcaggatggaccagtactgaagtgctgacttcgctgcttgtcggagcggccgcgctgattttctttatcgcaagacagatgaagctcaaaaaaccgatgctggaattccgtgtgttttctttcgggattttcagcctgaccaccctgctcggaacgcttgttttcgcgctgctgatcggaacggaaaccattctcccgctttacacgcaaaaagtccggggcgtctccgcgtttgataccggattaatgcttttgccgggcgcgattgtgatggggatgatgtctccgtttatcggccgggtgtttgacagaatcggcggaaaaggccttgcgatgaccggattcttcatcatcctgctcacgtccctgccgtttatgaatctgacggactcgacgtctctcatttggattgtcgtcgtttataccgcacggcttttgggaacagccatgattatgatgccggtgacgacagcgggaatcaacgccctgccgcgccacttaattccgcacggcacagccatgaacaataccgtccgccaagtcggcggttctatcggtacggcgctgctggtttccgtgatgagcagccaggccgcgcacgccaatgcgtcaactccggcaaacgccgccctgcacggcatgaatgcggcctttgtcgtagccgcctgcatcgcgctggccggcttcctcctatcttttacattgaagaaaaaaccgcgtcagcccgagcagcagcaggccgttacgcggtaaaccaaaaagaacccgatcacgtatgtgaccgggttctttttttacttctcgattccgtcttttacttctttcaccatttgcgccatggattccaggccgcctcctgataaataccatgtagctgaatcaaggtagacaacatggttgtttttcacggctttcaccgattttacataatcattttcaaccacttgttttgttgaagattttgtgccgatcgctgttccgcggtcaacgacaaacatgtaatcagggtttgttttggcgatatattcataggaaatgctttgtccgtgcagtgaggcttcgatgtttttgtcagccggtttgacgccgaacacatcatgaatgaagccgtatcttgatttagacccgaacgcgctgattttgccgtcgttcgccatcaccactaatccgtttttatccgtgctgcttgtctttttcttcagatcggcaatggatttgtcaattttcgcaagcttatctttcacttcattttctttgttaaagattttgccgatcacttcggtgttttgcttgaatctgtcaacgtagtttgtatagtcatcatcaagataaatcgtcggcgcgatttttgagaactctttataagaatcagattgtctgtgggcgataatgattaaatccggatcaatatccgcgactttttcaaaatccggttcttttaaaccgccggtattggcgtatttatcactattatatgaagataagtattttggaaggttttgtttcggaagtcccgccacgtgatcctgtaaaccgagttcatccatcgtatccagcattccgaagttgaatacgacgacttttttcggattcttcggcactttgactccttctttgttcagatcatctttgattgtgattgtttcttttgatttgcctgatgttttgtccccgtttccgcatgcagaaacaacaaaaatcgtaactagcgcaatgaatagcaatgcgaattttttcatgactttcacctcatctggtttttaagaaaagtacacaccgatccgctgactgtcaatctcttgaatcgggatggtcatatcataaatatcttcaagcacggaggtttcaatgatctcttccgccggcccttctttgacgatccgtccgtttttcagtgcgacgatatggtctgaatatacggatgcgaagttgatatcgtgaatcactacgacgaccgtttttccgaagtcttccacaagccgcttcaacagcttcatcatttcaacggaatgcttcatatctaaattgttcagcggctcatcgagaaaaatatagtccgtatcctgagcgatgatcatcgcgataaacgccctctgacactggcctccgctgagctgatcgaggtatttatcctttaagtcatccagcttcatataactgagggcctggttgatatgcacccaatcttcatccgtcagtttcccttgggaatacggaaatctgccgaagctgaccaggtctttaatcgtcagtctgatattgatttggttcgtctgcttcaggatgctgatttttttcgccagatcgttgcttttacaggccccgatctcttgcccgtcgaccgtgatttctccggaatccgtcttaatcagccggctcatgatagacagcagcgtgctttttcccgcgccgttcggaccgataaacgaggtgagcctgcccttttgaatggatagagacgttttctcaaggacggttttccctccgtattgtttgcttacatttttgacctctaccatgatttattctcctttaacagcagatagataaaataaatcccgccggcaaaattaatgatgacgctcagcgtcgtggaaaacgtgaacactttctccacgacgaactggcccccgacgagcgcgacgatgctgatcaggacggaacccgcgattaaatacgtgtgcctgtaggtttttaaaaactctctcgccagattgacgacaagcagtcctaaaaacataatcggcccgacaagagccgtagagacagacacaagaatggcgacgacgatgagcatctgtttcacaagcttatcgtaatcaatcccaaggttgacggcgtgctccctgccgagcgacagcacgtcaaaaaaccgcgtgaaccgccagacataaatgcctgtcagaagaaagacagcaccggcaaatcctaaaagatcggtgttgatattgttaaagctggcaaacattttgtcctgaacaacctggaactcattcggatcaatcagcatctgcataaaggatgacagactgttgaacagcgtgccgaacacgacaccgacaagcagaaggaaaaacacgttccgcccctcgcctttaaacatgagctgatacaaaacgagtgacaagagcaccatcagcccgacggagatgacgaaattaagatttttgttcatcatgacgatattcattgaaccgaacaggaacacgatgacggtctgaatgagcatatacagggaatcgaggcctaaaatgcccggtgtcagtatgcggttatttgtaatcgtctggaagatgaccgttgaaaacgcgatcgctccccctgtgagcatcatggcaagcactttgaagcatcgtctcggcagggagtattcccaattgcccagtccgtagaacagaaagaatccgatacatattatggcgagcgccgccagcagcgtaatttttttattatgactcatatgcttttctccttaacagcatatacaggaagatgccgctgccgataacaccgaccatcaggccgatggaaatttcgtacgggaagatgatcacccttcccaaaatgtcgcaaaacagcacaaaaacagcgcccaagagagcggtgtgaggcaggctgctcctcaggttgtcccctttgtaaatcgacaccatattgggaatgatcaaaccgagaaacggcagcatcccgacggtcaggatcaccagtgaagcgatgagcgacacgataatcagaccgatattgacgacgcgtttgtatttcaggccgagattgacggaaaagctctctcccattcccgccaccgtaaatttatccgcatacacataagcgatgatcaccagcgggatactcagatataaaagctcataccggcctttaacgaccagtgagaaatctccctgcagccaagatgacaggttttggatcaggtcgtatttatatgcgataaacgtggcgattgagctgacgatgttcccaagcattaaaccgacgagaggaataaaaatcgcatcattgaacttgattctctcgaggattttcatgaaaaggaaatttcccgccaacgcgaaaataaaagcgatagacattttcacaagcgggctcgctgacgtaaaaagcattaatgaaatcaaaattccgagccttgcccagtccatcgttcccgcagtcgtcggcgatacaaatttattccggctgatctgctgcatgattaatccgcagatgctcaggctcatgccggcgatgataatgctcaccaaacgcggcagccggctgtcaaacaatgtacctgcctgttctttatttaaatgaaaaatatccagcggcgacaaatcttctacaccgataaatatagaagtacacgccaaaaccgccagtagcaaaagtaagtaacgtagcttcatgctgcctccctgcacccatcacaaacggtatgactgattgccaaacaactcccatatatccccactcgtaatgattatcattatcaacgacaactataatcttatcatctttccaagcgcagtcaatacagttttgctttcaaaaacggtcatccgcgggccgtacactaaattgtcttacaatcagtctatcaagaatttgcaggattttctataaccttcatttggctgcttatcattttttgcacatgatgacacgcttgcgggaaacaaatctgacaaacagcggcaaaattcctccacgaaaatacaaatgttctccccacatagaaaaaatccttgatttacatgtttgaaagagagataataaaaattaaatttgtgagaaaatttaaatattaggggatgtaaatcatgaaagttgtaaaattcggaggcagctctcttgcgtcaggagcccagcttgagaaagtgtttcaaatcgtgacggctgatccctcgcggaaagccgtcgtcgtatcggcgccgggaaaacgcttctcggacgatacaaaggtgacggatctgttaatccgctgtgcggagcattatttgcaaaatggtgcagcgcccgagcttgccgaaccggtcattgaacggtacgccgccatcgcgcgtgagctgaacctggatttctctattatagaaagaatccgcagtgacctattcgctctcttaaacagcagcaaagccaatcccgatcagtatatggatgcggtgaaagcgagcggcgaggacaacaacgcgaagctgatcgcggcctacttccgccggcagggcgtgaaagccgaatacgtaagcccgaaagaagcggggctgtttgtgacgaatgaacccggaagcgctcaggtgctccctgagtcttatgatcatttgtaccgtctgagaaaccgtgaaggcttgatcatttttccgggatttttcggttacacgaaggagcatgagattgtgacgttttcccggagcggttctgatattaccggctccattctcgccagcggcttaaaagccgacctgtacgaaaactttactgatgtggacgccgtctattccgtcaacccgtcaatcgtgcggcatccgaaagagattaacgaactgacgtatcgggaaatgcgtgagctctcctatgccgggttttccgtttttcatgatgaagcgctgattcccgcttttcgggccggcatccccgttcagattaagaatacgaataatccggaggcgaaaggaacgcgcgtcgtcagcagccgtgacaatacgaacgggccagtcatcggcatcgcaagcgacacgggcttttgcagcatttacataagcaaatatttaatgaaccgggaaatcggtttcggccgcaaagcccttcacattttggaggaagaaggattgacgtatgaacatgttccatccggcattgacgacatcacgatcatccttcggcacgatcagatggactcagaactggaacacaggctcgtcacccgtctgaagcaggaacttcaagcagatgaagtcacagtcaggcacaatctggcgctgattatggtcgtcggggaagcgatgcgccataatgtcggcacaaccgccagggcatccaaagcactgtccgaagccggcgtcaacatcgagatgatcaatcaggggtcatcggaagtcagcatgatgttcggggtgaaagaagaacaggaaaaacaagcggtgcgggcgctgtatgacgagtttttcgccggagtcttactcccataggacaccgcctcttttttctcttgtccactaatatcccttacaaagcagcttcttttacatattgtatggtatagacaatatggaggtgaagctcatgtcaggatattctggaatcagctctttcgctttgatcgttgttttatttatcctgttggttattgtaggtactgcctatgttggcggtttctaagcatcactccgtctatatgaggacgctgcgggttttgacctgcggcgttttcttttgttttccgccgctgtccaagtccggccgcgcaaaaaaaagactgccgggaacattcccgggcagtcttttcctttgttcaggttattttcttctcacgtcattcctctttcagctacatggaattcagcctgatctgtctggcctgcacctgtcactgtaaaaatcgcggcggctgctaaacaaataacaaaccatttagatttcaatttcatacaaaccctcactcctttgtatttgtttccttgcctcttcgactttcagaaaatagtcagaagaaatcttaaagcaattttgttcatagtaatatttagctgcttctagtgctaaatcctctatatcggcgtataaatttttatcttccaggtaacggaaacacgcgctgattgtttcctcatccggtttcgcctgatacagagcctgcagccattcgaattttaccgtgtaaacgggatcgtctgtttctttagcatattcatatccccgcttgtgatattccgacgctttttctttttttccgagtttaaagtaaatgagtgtgattaggaaatatgcttgaggaagagaattgacgattctttgtgattcaaatgtatcaaccgcccgttcaaagtacggaatcgcttcgccgatgcggtcctgattgtagtagcacagtccgaggttatacagcgccctcccgacaagctgcgctttttgttctttttcggccatttgcaaagcgtgctgaaaatgtttggccgcctgttcaaagcgcctttcatccattaaattgacgccgaatacaaaatggcattgaatgatcctgacgttatatgtgtcctgctctacgtaaatttcataagcgttttttatatgtatcaaagaaaaatacgtttgtttcatatgataataagcttcggccactttaaaataaaactccgcccgttccacgtggtccgatacgaaggccagttttttctcagcttgtttataatacgtaatcgctgagataaattctcttttatcaaattcaaacatgcctttgaaaaagttgacgtaataatcgagaagccctttgaggccggcctggctgttatcaatgttatcaagaatttccgacagggtcggctggtcttctatcttcagtttttccagcggctccaagtagtccagcatcagctgatggcgaaattccatgagggaataataaagcactaagtttgaatcaggctccatacggtcaagctcttgtttgatctcggccttcaagatctccgcatccggcacgctgaatgttctgatgtatcgataccactcgttaattttctgcccgactgctgaagaaggaattaacccgctcttcattccttcaccctccccatccaagacctgtttaccagttattttatcacgtttccgtgtctttccatcccgaaaaacacgcaaactttgtttcggcagagcgcaattttccgagtgaagataaaacagccggtagccagacgggactgccggtttcaagatgattcatgtatcgtattcagcggaaggcggattgtaaacgtcgtgccttttcctttttcgctggcaatatctatcgtgcccttgtgcatttcaacgagctgcctgacgatggacaggccgagtccgtattcgccgtatgccgtattcgtccgggacacgtccgccttataaaaccgctcccatatatgctcaatttcctctttggagatgccgattccggtgtcttcgatctcaatcaccgtttctttatagccttcatacccgcgcagcgtgatgtctccgttttgcgtaaattgaatgctgtttttcgtgatgttgacgagaatctggatcagcctgtcataatcggcgaacactttgacgccgtcctccgcctgaatccgcagctgattttgtttttcctccgcctgctgattgagatgctctttaataatttcaaacacctcgatgagcggcagactgagcttgtccagtttgatttgctgggatctgattttttcataatccagattttctttcacgagcctgagcatccgcttcgtttcttcactgatcagcgagaagcatttctctttatctttttccgggatggtgttgctgttaagcccctccacaagtccgttaatggtcgtcaaaggcgttctcagctcatgggagacatcggcgataaattggcgcctccgtttttccaggcggtcaatctgctctctcgattgcttcagatttttggccatgatgttgaaatcggacgccagcatgccgatttcatcgccgccgctgttcttgagcgaaatatcgtaatccccggatgccacttttccggtcgcatcccgcaatgtctgaatccgcttaacgtgaaatttagataaaagccagctcagcagaatcgtgatgataagggtgctgataatcgcgtaaatcatatagcggttgacctggctgatcatctgctcgacccctctgacgggagacacgagcagcaccgcgcctttaaattgatcgttgatcaaaagcggttttgcgacaagcgatacttccaagccctccgtattaaaacggttcatctccgctctgatctgaacggttttcccttgcttcagcatgtgccactctttacttttgagcttctcgcgcggcggcatatcgtcaggaaaaaagtaaggccgctgatgttcatcaaaaataataaacctggtctcgcgcgtttttaacatgtcctgatacggatacaggcggcgcagatcaagatcgcgtccgttcagctcacttgtgatctgctgggcgtaagaagacagctcatccactttattttgatacgcaaaatctttcacaaagtgcgaaaacagggaaatgataatgaaaaaggccaaaatcaaaatgctgacatggcttaacagcagctgatataagtatttaatcctcatcaaatttgtatcctacccccacaccgtgtataaaaacggtttttcctcactggacagttttttgcgcagccgtttaatatgaacatcaaccgtacgttcatcgccgtaaaattgatagccccacacctgctcaagcagctgctctctcgaaaagacctggcgcggattttgtgcgagataaaagagcagatcgaattccttcggcgtcagattctcgacaggctttccatgcagaaacacttcccgcgtcttcttattgattgaaaaacacgccgtttcgatcaagtcgccgctttttacggcctgccccgtcgcccggtatcttctgatcaccgctttaatccgcgctactagcgtcagcgggctgaacggcttggtgacatagtcgtcggctcccatttcaaacccgatcacctgatcagactccgtgtcctttgcggtcagcataataatcggcacactgctcgtctctcttattttccggcagatcgtcactccgtccatagatggaagcataatatccagaatgaccaaatcccagtcctcttccgtgaaccgctgatagccttccactccgtcatggacaaattcggcttcaaatccttctttaaaaaagaacatttccgtcatggtgcatacgcttatattgtcttctatcattaatatcttcattgggtcctccgtttatcttgacgcttttacttataatagcaccattttacccggatattttcgcgtttcacaattgttagtttttatttcatcacccggaaatagtttgttcatatttttttcatacatttctcctactatatacatatcggataaccggttctaaagaaggctggttttacaagatctgacacccacacggaggaacagacatgaactttataaaaagagccttttggagcatgaaggcaaaaaagggaaaaacgtttttgcagctggttgtgttttcagtgatttgcatttttgtcctgtccggtcttacgatccagtcagcggcaaagaaatcaagcgaactggcaaggcagcagctcggcgggagcgtcacactccaggctgaccgccaaaagcaaatggcgcagcagcaaaaagacggtgaaaagaggacgtttgaatcaacgccgatttccgtctcggatgccaagaaacttacatctttacagcacgttaaaaattacaacttcctcacgacagcgtcagcaaacgcagaaagctttgacgcgataaaaagctcagacgaatcagccgataacagttccggcggaagccgttttcaaggcggcggaagacagatgatttcagcggatatttcggtcgaaggcgtgctctctacggcgctgcttgatgatttcacaggcgggagctcaaaaatcactgatggccgcgccatcacaaaaacagatgcggacgcaaaagtcgcagtgatcaatgaaacgctggcagatcaaaacaagctgaaggtcggcggctccattacagtttcctcagcagcggatgattctgtgagtacaaagcttaaaattgtgggaatttataaaacaacatcatcaggagacgatcaggcagagcatttttcattcttaaaccctgacaataaaatctatacgccttacaccgcagctgcggcgttaaaagggtctgataacaaaaacagaatcagctcagccgtttattatatggatgatgcaaaatatattgactcattcgttgcggctgcgaaaaaaacatctatagatgataaaacctacacgctgacgacaaatgatcaggtgtatcagcaaatggccggcccgattgaaaatgtcgcgtcattttctaaaaacgtggtgtaccttgtatccatcgcgggcgcggtcattctcggattgatcgtgatgatgtcgatcagggaacgcaagtatgaaatgggtgtcttgatggcgatcggcgaaaagcgctggaagctcatcggacaattcttaacggaaattctgattgtcgcggttatcgccatcgggatcgcatccgtcacgggcagccttgtggcgaatcagctcggaaatcagcttctttcccagcaggtcagctcagccgatgattcccagcagcaaacaagcggctggggcggaggagaaatgccgcggggagacggcatgttcggtcagcattcatccggtgcagatgtcatcagtacaatgcaggtaaacgtttcgctgaatgaccttctgattctcggcgggatcggcgtcgcaattgccgtcatcgccacattactgccgtctgtatcagtcatgcggcttcaccctaaaacgatcctgaccaagcaggaataagaggaggcagcataatgagcctattaacctttcaacagatcggctactggtaccaagataaatcacagccgctgtttcaggatataacgatcagctttgaaaaagggaagttttatacaattgccggcgcctccggaacgggaaaaaccacgtttctgtctctggcgggcggccttgacacacctaaagagggaagcatcctttataacggagaagacatcttcaaaatcggattaaccaaattcagaaatcaatatgtctctatcgtctttcaatctcatcatctgatcccgtatatgacggcgctccagaacgtcacaaccgcgatggagattaccggatctaaggagaacaacaaagatgcgtccgcgctcagcatgctggataaagtcggcatcaccgaacagcaggcccgtcagcgggtgctgacattaagcggcggacagcagcagcgcgtttcaattgcgcgggctttctgctgtgacacggatctgatttgcgcggatgagccgacgggaaacctcgacgaggatacgtcaaaggaaatcgtccggctctttcaggatctggcgcataaagacggcaaatgcgtcatcatggttacgcacgacgaacaaattgccaaagtgtctgatatcaacatccgcttatcaagaggaagtttcacggtcaaagaaaacggcacggccgtttcctgataccgcgcccctgccagcgcagacaggggcgcaccctatatccccctattcaatagaagtgaacgtaaaaagagccagggctgcatcccctcgctctttttatttatatcagctgtaaataacggtcaatatttgattgtccggctgctttgatcaattcttccgcctttttctcttctcccggcaaagcgagccggagcttgtcttcaatgtctttttcagaaagaccgtttcccggcgctcccctcggacagtcgatacgtgcttcatagacatgaccgccggaaaccgtgacccgtacaattgtaaaacggcccttcggaacggcgttgtcagccggctgaatttggtcatcgcagctgcggtgaatccgctcaaatcctttttgaagggattgcggaatcggctcggatgtgaaatgttcaactgaaaaatccttaccgtgcaaagctaaggtgatcacatattctacgctgaaccgacccgcttcgcctgttttcggacgccgttctgtcaatgcggcgtccccgcccggcggataaatcacgtcaatccgttccgtttggccgaaagtgagaccatgttcggccttcagcttgagaatggcgtccgccgcatgatgggccgccgagcaaaacggataaaccttaaaccaaagtcccggactcacgatccgccaagggtttccccacccgtttacaagcagggtttctgcccgttcaagatcgccgtacagtccgaaaaaacctttctccccgtcgagcgcatgagctgagccgccgaaaccggcctttgcaagctttacggcgaacaccccggcttgagcggccaggccggcgtggagcggcttcatttctgtcccgaattgcactctcatgcctccggaacgggcagccgcaaacccgattgctttctgtaattgggtttgattcagattctctgcgaatccgacggcgcatgcggccgaaatggcacctaacgttcctgtattgtgccagcctttctcgtaatgatcccttccagctgactcgccgagccgcgccatcacttcgattcccgtcacataagcaccgagaaaacggctcttgtctatccggccggctgatgcggctgcaatcaaagccgggaggatgaccgcgctcggatgtcctcttacatcagaatgaacatcgtcaaaatcaagcgcatgtgcgatgaagccgttaatgagcgcggattgggacggcgtggttttttgatttctgccgataagcggcgctatcggcatcccgccttcttcttcggccagttttaccagcttttcaactcctgtatcccgtctccccgcaaaagcagccgctgtaaaatcaagcagtcctttgcgcgcttctttcatcgcttcggcggatgtttccggcacagacgacatgacggcctgagcaagtccggccgtcagattttccgtattcattccgtctgctccaatacattgacggcaagccgggcgaaaaactcagccgctttcggaagcgctttttcgtcgagtgtaaaggctggatggtgccattcttctgttccgtttgttcccatccagacgaagaagccggggattttttcttgatataatgcgaagtcttcgccgccgggcgactgttctgcccgaacggtttgaagtccgaggctttcagccgtttgttccgccgcctgtatgaatcgggcatcgttcatcactgacggcaggtaaggaaaccagcggaagtcagcctctgccccgaatccggccgcgattccttcggcaacccgcttcatatgtttcggaacagcgtcccgcgcttctttttgaaacgtccggacggttccttccatttcaacatggtccggaatgacattccaagaactgcccccctgaactcttgtgatgctgacgacggcattgtgaagcgagctgatgtttctgctgacaatcgattgcaggccgccgatgatctgccctgtcgcctgaatcgggtcaatgctgttgtcggggattccggcgtggccgccttttcctttcacggtgatttcaaagcggtcgacactcgccataagcgggccttctttcagaccgaccgtgccgacggggaggtcaggtttgttatgcatgccgaatatcgccgatacaccgtcaagcgcgccggcttcaatgacctgtcttgctccggcggcgatttcttccgcgggctgaaaaataaaccgcaccgttcctttcagctcatgctttctctcatttaataagaaagccgtgccgaggatagatgccgtatggaaatcatggccgcatgcgtgcatcacgccgctgttgcgcgaagcaaacggaaggtttgttttctcttcgatcggcagtgcgtcgatgtccgctctgacggcgatgacggggccgcttttatctcctttgatttcagcgatcactccggtttgaagtttcggcacatcaagaaccgtgattccttcttcctccagccagcggcggattttattcgtcgtttcgaattcctcgcctgacagctcagggtgttcatgaaggtcgcggcggatattgattaaacgtttgtttaatgattcatacgtttcatttgccatttcttcttcttcccttcttagacaagttcggcaggctctcccacttgcttaatgaattttttcgtccgttcgttctgcggattgtcaaacagctcctccggtgttccctgttcgatgatgcgtccgtccgccataaaaataactttgtcggctacttcacgcgcaaaagccatctcatgcgtgacgatgatcatggttgtctgtttttcggcaattgatttgatgacttggagcacccctgctacaagctcagggtcaagggctgaagtcggttcatccagtaaaatcgcgtgaggatcaacggccaaggctctcgcaatcccgatccgctgctgctgcccgcctgacatcgtaatcgggtagctgtccgctttgtgttctaaaccgacttgccgcagcaggtccataccgatctgttccgcttcttttttcggtttcttttgcgcggtgatcagcgcctctgtcacattttgcagggcggttttgtttttgaacaggttgtaattctgaaacaccatcgccgtctgctggcgaagcttgtgtacgtctttgcgcgaataggacgctgcattcagctttgcatcgccgatttcaatgatgccgtcatccgggcgctccagcagattcagacagcggaggagcgttgattttcccgagcctgacgggccgatgatggccgtgacttcgccgcttttgatctcaagatcgatcccgtcaagtacggtaagatctttaaatgcttttcgaatatgtctgacttgtatcatcctgagcctcctcctatgtgcgataaggcttgctgatcgcccgttcgagcagatcctgcagcacactgtaaataatcgtaagaatccagtacatgaccgcgacggctaaatacgtctcaaaatatttgaggttgcccgatgcgtacatttttccttgggcgaacatctccatcacacctaatgtaaaagcgagcgatgtttcttttaacaggccgataaacgtatttcccgtcgcgggaagcgcgtttctgacggcttgcgggaaaatgatccgtctgtacgcctgggattttgtcattccgacagacagacaggcttcaagctgcccctcatcgactgagttgagcgcagcgcggaagatttcagccaggtaggcggcatttttcaggcttaacccgataatcgccgcagttaacgccgtcatcttgctcatcccgggaaagagctgaggcaggccgtaataaattaagaaaagctgcacgagcgtcggcacgccccggaaaaatgaaatatacacctttgacagctggtgaagcacaggaatacgatttttgtgataagcgctaatataaggccgccgatcacggcaaataccatggccgcgacggccattagtaatgtgatcggcaaggcttcgattaacgcgggaaaagctgaaaacataaatccccaatcaatgctgttcattctcgattttcaccgccgtttcttattgctttgcttcctttgtgatatcttcgttaaagtacttttcagacagctttttcagcgtgccgtctttccgcaggtcttcaatggctttgtttacttttttgcggattttatcgtgagccgcatctttcgcaaacgggaaagcgactttttcatagacaatcgggtctcctgctaatttcagaggcagaccggtctttttgatctgggcgatcaggacgctgcggctgtttacataggcgtcaacccgtccgtaagccacgtctttcagcgtaccttcttgtgtttcatatgtttttatgttgatttttttatccgggtccttgctctcaaggtttttcgcgtggtttgagcccagaacggccgccactgtttttcctttcagatcattgactgatttgatgtctttgttatcgtttttgacgacgacttgagtgcccgcatacgaatacggttctgtgaagttatacgttttcttgcgttcgtccgtgacagcgacctggtttgaaatggtgtcgagtttgccggtctggagctcgcccatcagtccgctgaactcaagcagcttccagtccagtttcatgttgatttttttcgctacggcttccattacatccacgtcaaagcctgtcagcttgccgttttctttatatgcgaacggatagctttgtcccgtagcgccgacatgcagcacgttatcgccgccttcgctttcttttccgtttccgcatgctgttaagaccgccaaaagcgcggcagacagcagcaaagcccatgttttcttcttcattgaaatcccgccttttcctattaaaatgttaatcctgcaattgtttttttaaatagatggtgatgtggccttttcctaaatccttttcgcctgcgcggacgtagcctttccgctcgtacatgccgatcagccacggatgcttgtccgctgtgcccagtgacacgaaaggcgcttttaatgtatcgcggagcactgtgttctccagccactccagcatgtctgagcccgtccctttttttccggtttcaggatcgacggcgaaccaccaaatatgagggacaccgtacggcccgggattcggcccccacggcatccgcagagaaatcgtcgccagaatccgtccgtcttcctccaaaacgtaacaggcgtttttttgtatgttattcaaaacgagctccttatccgccgttgctgcggcaaagttgatgccgagcttgcggatcggttcatacgcccgcagtgtcagtgaaagcagctcatcagcgtctgcctccgttgcgagccggtattgtcttgacatgatgagccctcctttagtcggcatatcggtttgccggtttttccagtccgaaatgttctctgagtgtggttccttcatactcttttctgaacacgccccgttcttgcaaaatcggaatcactttgtctacaaaaagagtgagaccttcaggcaaaagcggcggcatgatgttgaagccgtcacaagcttgttttccgacccattcttccatcttatcggcaagctgttcaggcgttccgacaaagatatgatggcctcttgaacccgccacatatttgtacagctcgcggatggtcatgttatcgcgtttggccatctcctgaacgagcttgaaccggcttttaacggcattcgacgcatccgcatccaattcaggcagcgggccgtcaagcgggcaggcggaaaggtcgacgccgcccagatagttttgcagaatgttcaggccgacagacggaatgatgagatcttggagctcttcatattttgcctgcgcttcttcctcggtatcggcgataacgggaaatatccccggcatgatcgcgattttttcaggatcacggccgaaagaagccgcttgttctttaatagattgatagaattcctgcgcggactccaaatgattttgcgcggtgaaaatgacctccgccgttttggcggccagcgcttttccgtctcctgatgatccggcctgaataatgaccgggcgcccttgaggtgtgcgggcgacatttaacggccctctcacggagaaatatgttcctttatggttcaattcatgcattttttctttatcgaaaaatgctcctgactctttgtcacggataaaggcgtcttcctcccacgaatcccataatcctttgacgacttcaacgaattcttccgcgcgctgatatctgagatggtgctcaagatgcttttcgccgctgaaattaagcgcggtcgattcaatcgaagatgtgacgacattccagcccgctcggccgttggaaagatgatcaagcgatgcaaattgtctcgcgatatggaacggttcgctgtatgtggtagacgcggtcgccgtcagaccgatgcgggatgtgacctgagcgagcgccgacagcagcgtaaacggctcaaagcgcgtcagcacattcggatgtgatttgccgtctattgataaactgtccgccaaaaacagcatgtccaatttcccccgctcagccgttttcgccagttctttgaaataatccaaattcatgctcgcgtccgccggtgcctgaggatgtctccaagaagcgacatgatggccggtgcccgcgagaaacacaccgagtttgatttcttttttctttgtcatgatggatctccttctattctgaaatacggttcggaaaatattaacaccactaaacctatatttcctagtaattttataagaataaatcaaaatgtacaattgtcacgcaagtttgtcaatgcattaagacaaaaatcatgattttaaaaataacccggcgcaccgtccgggttatttcttcgaaactgtatagacggtccctttgacctttttcttaataacggcaatgataagcagcaaaacgggaaacagcacttgaaacggaagatgaatatagatcggcacaatgtttaagccttcattcatgtgttccgaaaaattgcttgcgatgctgatggagagaatcagcacccccaatccgaccggaaaggccagctgagacggatttttttctttaaacagcgtggacacacccacgacaaccgcatatgtaaaaaggctgactttgaaaaaaccgccgatgacgagcacgagcatgaaaaagacatccagccggtctaaaaactcttctactttaatcgtctgtatggtgctcagcagcggaaattgagagcggagcattaagttgacgtccagcacacaaatattaatcgccactgacatcgccaaaaacagcccgctgatgataatcgccagaaatccggttttcttcacctttttccgatcttttaaataagggaaaatcatgacaaacacgattaattcaccgaacgggatgaacatcgtctgtttaaacacggaataaatgaccgttcctgcaccctccgctaaaacgggctggagaaatctgaggtttatcgtgcctgagctgataatgaggatcagcccgacggctgtcagaaaatacataatgccaaacagcagctcgccggctctcgctatcacttcaataccctttctgaccgcaaatatcgcggcgatcatcagcatggcattcacaattaaaagcggcgtgtcctggtaggcgaaggtgacaagcatttcgccaaaatcccgcaatacgcgggccgcgatataagaaaaatagagaatataaagaagcgagaccgcccagctcagatgtctgccgatcagttcgttcatgtaatctctcggagaagactcaggaaaaaattgatacagcgcctgataaacgtagaaaagtccgagaccgataacgcacccgagaagcacggacagccatgcatcccgcccggccatcgtgcctggcgggatcaataacgaactgcccaattcaaacaaaatgatcataataaacagctgacgcgtgccgattttcgcattttccatacgcttcgctcctttctcctcaaatcaatcatgctcaagcttgtctgagagaggattattccgcaagcccgttcttctgataatgacttccgttttgacatctacggggagattggggaaatattcttcatcccacttccctttgaactttttccatttgtccggatgcttccgatagatcaggtctccgaagccgacgaagtcattcttacgggcttttatatcttcaattgatttggtgatatctttgtcaagctgcacgctgagcgccttttgcatcgtcatcagcacttgcggatcagacagatggaaagggtatctgacagcgtccaccagcccctcgacctgagcatgcacgtgaatatgcggttttccgttcggaaaagtggccgtcacctttgtattctggcgggtgacctgcagactgattgcgtgcttcacattcttccaatccgcattgatgaacgtatgcttgatcctattgagcagccatacagcccccacactgtcgtcatcctcaatccagtaatccagcctcccatcctttttgaacaccgccagtccgtccgctgacagcactgctttcggttcagtcgtctgcgtattttccatcgtaggaccggctttatcgtctccgtgcatttcataacccggaataaacggcgacccggccggagaagcgagatcaatcagaacgtcctgaaggctggttttaatgactctgccgtattgttcctgcgtgaagctgagcgtcttgttcactttattggaagggattttatcaatcggcgtcagcactttaataatgtcttcagccttgcaattatgcgcgatcaccgcggttgcggtcgtcctgaattcggtgtcgcggtcaagattgtccagaataaaactgagcccttcctctttcgccagcttttcactgaacaccacgagattcgtatgcgcaaaatagagccttctggacactttcatcgagccttttctcaaagcttccgtcatattgtctccggacaccgaatagacggaaaccggaggccggtctcccgctccgccgccctgcagaccgccggccacgtttcccggattgataatttgcaagtgaaggacgtattttcccgtttcggtccggtcaataccgatggcggagatcacagccaaatcagtcagctcccttttatcccagcatccggatacaaacataagggaaaccatcgtacaaaggataagtatccatttacgtcttttcattaccgtcgccctcttctacatctttattaaccatccctctggatgtctccggtttcggtctttgatgttccccttggcgcctgttgttttcctgcacgagcagttccggccttttttcatctgcccataacggagcgcggaggatggaatccttcagcccgcccggggtcaaaggagcgagcggggacatatacggaaaaccgaatgaacgcaggccgcacagatggacgaacatcatgataatgcccagaatcagcccgtaaaatcccatgaccgccgctgacagaataaagagaaaccggatcagccgcgcggatatcgccatgtcaaaagccggggtcgcaaagctggcaatcgccgtcagcgcgacgacgataaccatggccggggagacgatgccggcctgtacggcggcctggccgatgacaagcgctccgactatggaaacggcggagccgacaactctcggaagccggacacccgcctccctgagaatctcaaaagccacttccatcgtcagcgcttcaatcacggccgggaacggcaccgtctcccgctgagccgcgatgacaatcagcagctgcgtcggaatcatttcctggtgaaaggtcgtcgccgccacataaatccccggcgccaccagtgaaatgaagaaaatcaaaacccgcagcaccctgatgcttgtggcgatatcaaatcgtgaataataatcctcaacggattgaaaaaattgaataaataaggccggcgcgatgagaacgaacggcgttccgtccacgataatcgcaaatcgtccttccagcagattccccgccacgacgtccggccgctccgtatgatatacggtggggaacacagaaaacggcgcgtcttcaatgagctgttcaatgtagccggattccaggatgctgtcgatgtcaatgtgcttcagccgcttgcggacttccttaatcagctttttatcgcaaattccgttaatatacatcagcgcgacatccgtattcgtttcgtgtccgatctccattttttcaacccatacatcaggcgtttttacatacctgcggatcatggaaatattggtttgcagagattcagtgaatccctggcgcgggccgcggaaagagacctgagtgctcggctcttgaatggaccggtgctctcccccttccgtgctggcgatcagcgccttgtcagccccgtcgacaaaaatgagcgtgctgcccgccaccagcccggcataaaggcttttccatttttcttcctctttcaccccgccgatcgcaagcgttttatcgtatatcaggcagaccgcttgttccggctgaacggacgggatatcgattaaatcctccagaagggattggctgacaagctgttcgtctaccaaaccggcgatatacacgattgcggccggaagctcttcttttccgattttcagccggcggatgacgacatcggcactgttgccgaacctctcagacagcttcttcatattttgctttaagctgagggagatcggctcatcccgctctttgtccggctggctgtccgcttcttttctgccttcattgtcacggtcgttttgatcggcttttttttgtttcctctgcttaaaaaatggcggcatatcgcaaaaaacctttcctcgtttttttcatattcttcctgtacggcaaaagattatgcacggcggaaagtctgtataagttctgcgtaatcgaaaaggataaaaagggagagtgatgcgcatgaaaatattaggggtttcattctttttgctgactgcctgtctgatcatttcagtaacggtggatatgctgcaaggtttcagtttctatggagcggttcaaaacaacctgtccgcttttaaattgaccaccttctcagaatggctgatgctgtttttattcgccctctttttaatcagagaaatgatcgctttatataaatcaggtaaaaaagatgcctgacaggcgcaaggctgtattgtgtcaaaaaagaacacattcctccttctctcggagttcatgtgttctttttatttttccggcgcagattgttctcagatgacgatatttccgctttccgtatctgtcgcgtgcttcacaatgacgcctttgataatgcggttgccgatgattttagtacttgcggaggagctggtttggatggcggaagcagaagcggcggataggttgttgatggtattgcccgaaacgagggaattggaggctccgttcagatagatgccgatcgggctgcccgctgttcggttgatcgtgagcgtattgtctatgacttcatgcgtgcctgagttcagatacacggtaacgataagcggtgatgattcaaagcggttgctgatgacagaggttcccgaggatgttgaactgaatacgggatagtttttatagttcttaaagagattgcctttgatgacagccccggcgtcatttgtcacagatacggcataggactccgcggcgccctgatacgcattcggaaggagcgtatttccttcaataacggcatttccgcctgtgacccatatgccccggctgaacgatttcagcacattttgttttacaatgatactgccggccgacatgctgattccgtctgtcacctgattcagagtgttattcgtaaagacggcgttctccgaaagcgtcgcccgcatccccgtgcttcgtctcgtttcggaacgtccgttttcaatgacattgccgtcaacggtcacatcttctgcctgatagacggaaatgcccgtattttcaaattgattaattttgttgtgggtgacgaggacgctttttccccttacatctattccggtggaaaacccggtaatcagattgttggaaatgacggcactgctgctgtcctgtccttgtgacacaccttgtccggcgactgcggtccttgagccgccgtctgaccgaaagaagacattccccgtaatgacggtatgcgccccatacccgtagctgattgtgttatcggaatgatttccttcaattaacacattatatccgttaaaattggtgactgagcttgcggcgtttccggaaaagaagttgttgcggaccgtaatatgaagagcttcttcataatcaatatcgccttctccgtacgattcaatatcgattccgaatttcggagccgttccgttcccttgcccggcgtcttcaatcacgcattcttccaccgtaacggtattgcagccggtgattgaaatgttgttccgccttgactgcctgatctcacagcggcggatggtcacctgttctgaagtttcgtaatcactgtttgtttttaacccgagcgggctgacaattataccgtctcccgtaaaatctgaaatcttcacattttcgatcagcacattgctgctgccttcaatacagattccaaacccccattcatgggtcgaccgcaaagggacattggtatacgtgtgttcatcccgttccccgatgatccggccgccggtgatggtgacattttcacgcctgcctatatagaaagccgagtagccccaggagctgttcggcgccactttaatcgtgcattccggatctaaaacgatggtgagatggctcggcacgttaatcccggcgttccgaaacggctggcttttgtccccgccaagcgtgccgttgattttatacgttccgggcggaaaaaacaccgtatgacagccttcgctgacggctctggccaagcattggttgatggcgcccgtcacatcggtttttccgtctgccgccacaccgcaatccgtaatatccaatatacgattcggcaagtgataatctcctccttcctctcttattgtcatcttattccgccatatcccgctccgcctgtacatactttaaattttattaaaaaagtttataaagatagtttagtcagataatataacaaaataagtcattggaatcaggaaaattcgtctatattcaccgttttaatatcttttcattctggaattttttgaattcagtataaattatattgacacaagtattatataagaatatgatttttgtaatacacttttttaagaaagggttggctcaggtggcatctattgataaggaatctataacagaaactgtgccgcaacgaggctttttcggtcatccccgcggcttgttcacactgttttttaccgaattttgggagcgtttctcctactatggtatgagagccatattgctttactatttatacacggaagtcgctcatggcggtctcggctttgataaaacgaccgcagttgccatcatgtccatatacggatctctcgtatatatgtcgagcgtcatcggcggatggctggccgaccgggtattcggcacggcaaacaccgtattttacggcggaattttaattatgttcgggcacatcgctcttgccttccccggcagcacggcggcgttttttaccagcatggctctgatcattatcggaaccggcctgcttaaaccaaacgtatccagcgttgtcggagatttatatacgaaggaagacgagcgccgcgactcaggtttcagcatcttttacatggggatcaacctcggcggattgcttgcgccgctaattgtcggaacactcggacagaagtacaactaccacttaggcttcggatgcgccgcggccggtatgttcctcggactgattgttttcgctctaacgagaaagaaatacctcggcaaagcaggctccaatgtaccgaatccgatttctaaatcatcagtgatcggcacgggaatcggagtggtcatcgcagcagccgttattattgttctgattcaaaccggctggctgacgatccagcgtgtgattgacaccgtcagtatcctcggcattgtcattccggttatttactttatcgtgatgttcacaagcaaaaaagcgacgaaaacggaaaaatcacggcttgcggcttatgttccgctgtttattgcagcggcaatgttctgggcgattcaggagcagggcgcgacgattctagctttatatgcggatcagcgcacgagactttcctttgcgggcatgcatcttgagtcttcatggttccagtctctgaacccattattcatcgttattttcgcgccggtgttcgcgtggatctggatgaagctcggcaaacgccagccttcaacaccgattaaattcgcgatcggcattatccttgccggattatcatttttagtcatggtgcttccggttatgggcggaagcggcgagcttgtgagcccgctttggcttgtgctcagcttccttttggttgtgcttggtgagctttgcctttcaccggtcggtttatccgtcacaacgaaacttgcgcctgcagctttctcagcgcagacgatgagtatgtggtttttaacaaacgcctgcggtcaagccctgaacgcaaaagtagtcggtttgtttgataagatttctgaagcggcctacttcggctcaatcggtcttgtttcgatcattctcggtattattttaattcttctgtctcccgtcattaaacgggcgatgaaaggcgtacaataaaagagaagcctgcggaatcgtccgcaggctttttttgtgcgtctatcgttttaactcctcaagtgtttctctccatctcttcaggacatcttccggttcgtggagctggatggccggtcctgatgtcagatccgcgtatttcgcccgatcttccttgacggtgatcacgcggcagctgaaccgttcccgctcgtgtttcgcctctttcaacggcggaagcgccttacattccaatgtgacgtaatatgcggctcctccgtgccaggcgatgaaaagagcttgtcccgaatgcagcaggctttttacggtcgtcgtgtttttccataaggcgagccggagatttgttctgctcacggccgcgatttcaccggcgctgatcatggccgcgtgcggacggccttcttttgtcacggattggagcacaaatgcgtcgtgctgctttttttcaagttccgttccgtctaaaagcgcgtaaagcgcctccggcaagtgctccgtcagcattacgcttttctttccgggacagcgggaacatgtgtggccgtctctgtttctttcggatcgattttaaatgccgggttgaatgccgccggattcgtgatactttccggttcacaggatctccatgtgaaaaagcaggtttggcattggtatatttcccaagcgcctttgaccggcgattggctgacggtttctcctttttgcgattcacatcgcgggcatgttttcatagtaaactcatcctttcttattgattcattaagtccatcagtttttgttcccactctttcgttgtcagcggggaatcaagcggctgcgaataatggcctcttgtttccggcgcgacaggcgtcgtggcgtcaagaatcattttgtgtgtcatccctgccggatcagaccccgggtcaagcggaaggacggacagatcaggaatgatgactgcatcgtgtttcggatgcattttcgttgagagcgcccacatgacttgcggcaggttaaacggatcgacatcctcatccacgacaatgaccattttgcagtagccgagtccgtgcggcgtcgtcagggcgcgcatgccgacggccttggcaaatccgccgtagcgcgttttcgtggagataatggcgatcagcccgtgcgtatacatcgcattcacggcgacgatttcgttcggataggcttccttcagctgctggtaaagcggcacgcacgtattaatgccgatcatataatcgcactccgtccacggcatgcctaagtataaatgttcaaaaatcggattgtttctatgatatacccgtttgattttgatcaccggcatgctgcggccgcctgaataatggcccgtgaactcaccgaaaggtccttcgtattcccgttctcccgcaaggatctctccttccagaacgacttcagcaccccaagggatgtctaaatcagacaatttagatttaacgattctgtagggctccccttgaatcgcgccggccatttcatactcggattgatcgtataacagcggagttgatgcagccgtcgtaatcaccggctcacagccgagcgcgatcgtaacgggaagattcacgccgcgttcttcagcttggcgaagatgaatcgcaatatcatgctgaggcacgggctgaatgccgaggcggtctttcccctttacctgcattctgtaaatgccgacattctgcttgccgaaattgtccggatcttcaagatcgcgggaaatgacgcacgctttatccaaatagtagccgccgtcccctggttgattctgaatagcggaaggatgtcaaatagattgatatcttccgttatttcattttcatgaaacggcgcggtttcttcccgtttgaccggcaccggaaatgcatcgtaccgtttggcaaactcaaagaattgttctttaacaggcgtatctttcggcatgccgagcatcatcgcgtgattcggccacgagccgatgacattcagagccacctgcgcatcgtgatgtccgtaaatattgttaaacaaaagcgcaggggttttatccccgagattgctggctgcacgcgcggcggcgcccaggtccggctccggttttacctcttcgttgacggttaagagctgcccttctttttcaagagcggcgagaaattccctaaaatcctgataggccattatcagattcctcctttttgtttttcaattccgtaccaccgtttcgcttccggcagacggatgccgaactgatcgagcgtccggaacacaatatggtctatcaattcatccatgtcagccggcttgttatagaatgccggcatcggcggaagaatgacggaacccatttttgtaagcgctagcatattttctaaatggatttggctgagcggcgtttctcttgtcagcagcacaagttttttccgctccttcaggatgacgtcagccgcccttgtcagcagattgtcagccattccggtgcggatgcttgccagtgatttcatgctgcacggagcgatgatcatcccgtccgtttcaaacgaaccgcttgaaatcgccgctgcctggtctttgtgagaatacgtataggatgcgagtttctcgacatcttttaacgtataatcggtttcatgtgtaatggtgacatttgcccaaggagacacgacaagatgggtttcgatctccgcggcttttaaatattctaaaagcctgatcccgaatatggctcccgttgccccggtcattccgatgacgagcttcatattgacccctcctttacgcttgaaatgtggtgtcaaatccatcatactcctgatatatccatatgaaaaatattcgttaaatctatgtatcataccttaaaggtataaaagaaaggagcgagcgttctcatggatattcggcaattgcgttatttcatcaccattgcccaagagcagaaaatcacgacggccgccaaaaagctccatatggcacagccgcctttgagccgacagttgaaacagctcgaagaagaattgggcgtcattctgtttgaccgcaataaaaagaaacaaatgaccctcacatatgaaggaaacgtctttttgaaaagagcgaaagagattcttcataagtttgaggacgctataatcgaggtacaagagctgaaggaggaggtggccgggacacttgccgtcgggtcaaccatttactgcgcagcgctcatgcttgagaaagtgtcacagatgaaagagcggtttccgcatctcacctttaacatttgggaagatgaacccgtctcactgctggagcttctggaaacccggcagattgacgccgccgtcaccaccaccttgattaaaaacgacggcattgaatcgaaggagcttgaagacattccgtgtgtattggtgctgtccgagcattcaaaacgactgtgcggagaaacgattaaactgaatgacatcgcctctttgcctctgatccttttgcgcaccgtcaatggaagaggtgtgtatgaccaagtcctccaagtttgtgaacagtacggtctcgacctccaggttgtttgtgaatgccatgactccgcgacgctcttgagccttgtatcatcaggattcggcgccacaattctgcctttgacgatgattcccgtccatatgcgctcgcatgtcaaaacggttatcatcgaagacaacccgtttgtcatgacaccggccgtcatctggagaaaagacagctacctgccgaagcctgtcagacagtttttggaattattttgatccggaacacgatgaattcccgcttatgaaaaccaattacttgactcatactaaaaaaaagttatcctttacaattgggagctattttttctcaataaaactactcagaaaagtggggaataaagaagatgaaaaaagcattattcgctttgttcatgatggtcagcatcgcaatgcttgcagcctgcggaaactcacaggacagcggatctaagtcaaaagacggcgatctttgggcttctgtcaagaaaaaaggcgtactgaccgtcggtacagaaggaacgtacgaaccgtttaccttccatgataaaaagactgacaaactgaccggatatgatgttgaagtgattcaagaagtcgcgaaacgcctcggtctgaaagctgactttaaagaaacacaatgggacagcatgtttgccggtttaaacgcgaaacggtttgacgtcgtcgccaaccaagtcggcaaaacaggccgtgagaaccaatatgatttttctgataaatacacaacgtcaaatgcagtcgtcgtgacgaaaaaagacagcacgattgcgaaagaggctgatgtcaaaggaaaaacagcggctcagtcattaacaagcaattacaataaattagcgaaagaagccggcgcgaaaattgaaggcgttgaaggcatggcgcaatcccttcagctcattcagcagggccgcgctgatctgacttacaacgataagcttgccgtactgaactacttaaaaacgtccggcaataaaaacgtgaaaatcgcgtttgaagcaggccagccgcagcagacatatttcgcattccgaaaaggaagcggcgaacttgtgactcacgtcaacaaagcgttaaaagaaatgaaagaggacgggactctttctaaaatagcgaaaaaatggttcggcgaagatgtttctaagtaacatgccggaacccgtgattgcaacagccattccgtgggatttggtgcagcagtcattctggccgattctttccgggggaatctattactcgattccccttaccattctttcctttattttcggaatgatcatcgcgctgattacggcgctcgccagaatgtcaaatatgaaaccattgagatgggtgttcagcgtatacgtatcagcggtgcgcggcactcctcttctcgttcaattgttcatcattttttatctgttcccgacatttaatattacgctggaccctttcccaagcgcagtcatcgcgttttcattaaacgtgggcgcctatgcttctgaaatcatccgggcatctatttcatccgtgccgaaagggcaatgggaagccggttatacgatcggcatgacctatcgcaagacattgttccgcgtgatcctgccgcaggcgtttcgcgtgtccattccgccattatcaaatacatttatcagcctgatcaaggatacatctctcgcgtcacagattctcgtcgcggagctgttcagaaaagcgcaggaaatcggcgcgcaaaaccttgatcaaatcttggtcatctatattgaagccgcctttatttattggatcatctgcttcttgctgtcaatcgtacagcatgtgatcgaacggcgtctcgaccgttatgtggccaaataaggaggtttcgatatgctttccgtcaaaggattaaataaatcattcggacagaatgaaattttaaaaaagatagatatggagatagaaaaagggaaagtcatcgccattctgggaccgtccggttcaggaaaaacgacgcttctgcgctgtctgaacgcgcttgagatccccaatcgcggcgagctggcattctccgatttttcaatagatttctccaaaaaagtgaagcaggctgatattctccgcctccgccgcaaatcaggcatggtctttcaggcgtatcatctgtttcctcaccgcacggcgcttgaaaacgtcatggaaggacccgttcaagtgcaaaagcgcgacaaggagcaagtcagaaaagaagcgatagagcttctggaaaaagtcggactgaaagacaaaatggatttatatccgttccagctttccggcggtcagcagcagcgggtcggcatcgcccgcgcgcttgcgattcagcccgagctgatgctgtttgacgaaccgacgtcagcacttgatccggagctggtcggcgaggtgctcaaagtgattaaggatctggcgaacgaaggctggacgatggtcgtcgtcacccatgaaatcaaattcgcgcaggaagtggccgatgaagtcatcttcattgacggcggcgtcattgtggaacaaggaccgccggcccagattttttccgcgccgaaagaagaacgcacgcagcggtttttaaatcgtatactgaatcctttgtaggagccggagaagaagcgaaacactgatttcgcttcttctttttttgggcggttatgctacaatgacaattaatgaatgttatgaaagaagggacctctttgaagcgggaattcttgatgcgctggacgttttattttgccggtctgttgattttgtctttcggggtatcgttaaccattaaaggaaaagctctcggcatcagcccttgggatgcctttcattatgggctttttcagcatttcgggctatctgtcggccaatggtccatcttggtcggcgcggtcatcgtggctttaacctgcctgttcacgaggacgctcccgaaaatcggcgctatcttaaacatggtgctgatgggaatgtttattgatttcttctcgtttctgcttcctgaggcgcacgctttttccttagcggccgtgtttttttctatcggattgctgctgatcggctgcggcgtcggtatttacgtatcagcagggctcggcgcgggcccccgggactctctgatgatgctgatatctgaaaaaacgggctggaacgtgcaatgggtgcggaacggcattgagctgacgattcttgccgcagcctgggtgatgggcggaccgatcggcgccggaaccattattacggctgttttgacggggctgattctgcgtttttctttgccgcagtcctctaaactgttaacatacgcgatctccgggcgggcaacgtccgttcattaaaaacaaagccgaaacggttttgtttttttattttcggacagctttcgtctgatatggtaggatggttttgacaatattttcagacggaggatctggacatgaagatttacggagtatatatggaccgcccgctttctgcaggggaagaggatcggatgatggcggccgtgtccgccgaaaagcgggaaaaatgccggcgcttttaccataaggaggatgctcaccgcaccttgatcggcgacatgctgatccgcaccgctgcggcgaaggcttacggacttgatccggccgcgatttcattcagcgtccaggaatacggaaagccgtacatccccgcgcttccggacatgcactttaacatttcccactccgggcgctggatcgtgtgtgccgttgattcaaaaccgatcggcattgatattgaaaaaatgaagcccggcacgattgatatcgccaaacgttttttttcgccgacggaatacagtgatctgcaagcgaaacaccccgatcagcagaccgattatttttacctcctgtggtcgatgaaagaaagctttatcaagcaggccggaaaagggctttcccttccgcttgattcattcagcgtccgcctcaaagacgacggccatgtgtccattgagctcccggacggacatgaaccttgtttcatccgcacatatgatgcggacgaggaatataagctggccgtttgtgcggcgcatcccgatttttgtgacgggattgagatgaaaacgtatgaagagctgatgtaagcatagaaaaaggagggtatcccctcctttttttgtcagcctgatatttccgcctgtttctgcagctgctttgcttcttgataaatttcttcgaacagatccgcgatgtattcttcttcaacacatgaaaatgcgattcgcaaatcggtttcattaatggatatcgtcccgattcctctcttttcaagcaacgacactcttaattcgccggcgtttatgtctttcagccggacacacatgaaataacccgagttaaacggataaggcgtccatacgtcttcatagtgcttgttttctgcaagaacggctttcactttgtcagcccgttttttcatgatattatatttcagcgatttttctttctcgtattccggtgactgcatcgcccgcagcataaacgtttgggacggatgcggggcgcttgaaatcgttcccctgataatcccttttgttttttcctcgagcacgcgcagcgctttttcgctttttgtgctgtacgtaataaaaccgacgcggaagccccacgcgtaattttccttcgtcgcgccgtctatttttacgcaaagcacccggtcgtgcacttgggcgagtttgctgaagatggattcctgaatggccgtttcatcgtaaaacagattgtaatacgcatcgtctacgagcacgacaatctctttgccggcctccgctgcctccaggatcacactgacgatttctgacgcttcctcttcccccggcgtatagcctgtcggattattcgggaaattcagcacgacaatcgccttttcttcctgctttttcagcagctcggacagccccgccgcattaaaacgcccatcctgctgaaaaagcgggtacgtctcaatggatgccttgcgccggacaccgaaaatgaaattgtaatttccccaatatttatccggcagaagcagcgcatccccttcattgacgaacaagtcggcggcaatgctcagcccgtgtgttaaagcgtttgtcacgatcggcgtgctgatgtctttgccggctaatgaaggattttcgagacgcatttttttcagccattcctgtctgagcggctcttttccctgcggcggagcataatcgtagatatcatcggggttataggcggacagtgtctcttgaatatgggaaaagtgcatggactcgccttgtgaggtggcaatcccgatcgtggcattatactttccggccttggctttcgcttccgccgattgtgtcagcacccctttcggataaaacaactctctgcccaaatcagaaagcatatgaagcacgtgcgggttttcttcagataatgttctgttcagctcttttgctgcatcattcatgtacgacaatcccttcaaaattatattccatcaaatcataacataaaatttttgataaatgagaaaactcacgggcagattttgttacaaaaaacagacagcgaatgctgtctgtcatatcctataacaattggcctgcagtgctcctgttaataatctcatatattcgttccgccactttttcagtttcacttaatatgaacatgtggccgtccgaaaactcatgaaatacgggattgtcggcccattttttccatccgtccgcatctttgatacattttttatctttccgcccgttaaaaatatggacgggtgattgaatcatgtgagaatcagacggacggaagctttcaagcgcgcggtagtcggacctgaaagaaggcaggaaaaatgacatgacctccttattctccactaactcctgcggcattccgcccagctcgataatatgggcgagaaatttttcatcatcaagatgagacacttttttcctttcaacatgcggcggctgaatggctgagatgatcacggcctgcgggtaaatcccctcccgctcaagcttttgcgccagcctgaaagcgaccatgcctcccatactgtggccgaacaggacaaacgggcggtcaggatggagattcaactcctgcttgtataaactgacaagctgttcaaaatcctcaacggcggacatttgatttgttccgtgtcccggcggttccgcggcaagcatctcacactcaccttgaagataggtgtggagcgggcggaatgatgcggaatagcctcctgcgaacggaaaacagataagctgcgttttttccgtggtatcgaacgatttaaagagctggaccattggcgggcttcctccttttctatcgtgaagctgtcagcttcggatgttccttccttaggaattcgagcaaatatgccgcattcctttcgagacattctccctgaagcatttctgcgtgactgccgcagccttttttcacacggtattcacctgtcgtggcttcctcccacgaagcgagccacggcggcatcgcaaagtccggttctgacgttaatagatctatatccgcattgaccgtgccggtgctgacggtatgcacgaaataagaataaaacgcgtttgtttttttggcgagaccttctttgacggcttcgtcattcagcgcttcgttatcccggtttaccttcatcagcgcctggacatcgctttctacggtgcggccttccaagtcgctgacgccttgttttttataggaatcaaccatgatcagccgctccactttacgtccttcggcttcaagccgtttggccgtttcaaaggcgagcgtgcagcctgccgagtatccgaacagcttgaccggtccttccggctggagctgattgatcagctctgtgtagcgttcgatgcggttgtcttcctcgataaaatcaaacgcacagattctatagccggacagctgttttgccagcggctggtacatcagcccgtaaccgagaaccggcgggaacgcaaacagtgtgtcagactgatttttattcatgatggtgagatctttcattcctttttcttcaccgtgaagcagataaccggcaatgtctgcgattgtcgtcgcttcgaataacagctgcaccgggatgtccgtaccgagctcttttttaatgcgcgacgctgccgtcatcgcttttaaggaatggcctccgagcgcgaagaaatcatcatgaatcccgatctgctgtctgccgagaatctcggaccagatgtgtgcaatcgtttcttccgtcgcgtttcgaggcccgatccattctttcgccgcctgagcctgatccggtttcggcagctgccgtttattgaccttcccgtttgtcgttaaaggaagctcttctaagaaagtaaaggtttgcggcaccatgtaagcaggaagctgttttttcaagtgcctctttacgtcttcagctgaaagcggcgtccggttcacgagataggcgttgattgatgcatctccggactcatggcggtctgcaacaacgaccgcatctttcacacccgggtattcctgcagctgcttttcgatttcttcaagttcaatccggtgaccgcgtattttgacctggtcgtcaatacgcccggcgtattcaatcgttccatccggcagccagcgtgctaaatcccctgtgcggtaaagcgtttctcccggcttgaacggatttgggataaacgtttgcttcgtcaggtcgtgacggttcagatacccttttgatacacccattccgctgatgcacagttcaccgacagctccgaacggctgaagctggttttgcccgttaagaatataaatacttgcattgctgatcggctttccgatcggcaatgaggaaatggaatccggtatatcatgcacgacgtgagctgtcgcaaacaccgttccctcagtcggcccgtaacaattaatcagcttgccaggccccatgatctcaagcgcctttctgacgtgaggcacagacgcgcgctcacccccgaataacacacagcggagccccttcagccactcctctcccgcatcggtgagaagattaaaaagtgcggttgtcgcaaacatgacattgacattctcctgccggatcagatcagtgagccgttctgtatcaagcagtgtatgttcatctgcgataatgagccgtgccgcattcaggattgatgcgtagaaatcaaaagtaaatgcgtcaaaggcgtaattcgaaacagataagaacgtatcttgttcagaaaatgccatatagtctacatgcttgaccaatccttgtatattggcatgagtggtgatattgcccttcggctttccggttgtgccggacgtatacataatatacgccggatcatcgggatcaattgcggctgcaggatcgcttgcctgttcctcaaaccgtgcttgatcatcgatgatgagtgttgttcctgtatacggcagctgagccgctttttctttcatctcctgatgtgtcagcagacaggcagccgcactgtcagtcagcatatacgagattcggtcctccggcagcttcggatcaaccggcagataagccgctcccgcttttaatacgccgagaatgccgatcaccagttcaagcgagcgcttcgtgtacaacgcgacaacggtgtctttacccgcaccttgcttttgcaaacggcgcgcaagacggttcgcttcctcatctaattcgcgataggaaagagtctggccggaatacgtaagcgccggtgcatcaggatttacattcaccgcttccttgaaccaatccgtcagaggcttcgcctgatgagtctcagccggcgggtttaagccggtaagcagaagctctctttccttttcatcaacaagtctgatcgtattgacagggtgatccggcttctggatgagctgctgaatcgctgtgagaagctgagattttaagcgcaggataaacgcctcatcaaacacattcccgttataggcaagcttaatcagcatctcatcacctggagaagccatcaggttgagatcataattcgatttctcaaaaacatggacgtcctccatatcaaagccgttttcactgttctcttcattttttgcatcctgaagcggataattttcaaacacaataatatgatcaatcagctttggctgatcggcctggctttggatgtcatagagcggcacatattgatgaggctcagactgcagcgattgctcctgcagctgcttgagcaagccgttaaatgtggtatcctcagacagcttcacccgcctcggaacagcattgataaacagcccgaccatatgttcaacgcctttgatttctgcgggacgcccggaaacgactgtgccgaagatcaaatcgccggactgctggtagcggctgattaatacactccaaaccgcctgcagcgccgtactcaaagtggtatgctgcgattttgcaagctcggtaaatgcttttgtttccgcctccggcagtgagaagagcagctctttcggctcatagccgttctcttgtttctttctttgctccgcaaatgtcgtttgtccttcaaaatcttctaagtacccgcgccagtaatgcagtgatgcatgtttatcctgcttttcaagccacttgatatagtctttatacggtttgaccggcggcaggctgtacggcttttgttctcgcagggcattgtataccttaaacagatcctgcacgacgatgccgaagcaccagccgtccaaaatgatgtggtggtagctccacacccattcaaagctttcttccgattttttaaagatggctgcccgcatcggaatatcccgcgtcaaatcaaagcccttgatcttatcctgttctttgtattcattaattttggatgcttgctcgctgcccgttaagtgtgtcagatcgatttcttctatctgaaactgccgttttttcaatacgacttggaccggcctttttactttttcgtgaatgaacacggtacgaaatacatcgtaccggtccatgatcacattcatgctttcttcaaggcatttgatattcaagctgccttttactttcattgtcatttgttcgatgtaaaagctttggccgggattcaggagagtatgaaacagcattccctcctgcatcggcgacaaataatacatgtcctgaacttgatcttttttgaactggctcatctgctccgctcccccttctgttaactgtttttgtcacgttaaattctcctcaagcatgtcaaagatgtctcccatttcatccatctcaagatcctgcgcgctgaaatcgctcggcgtaaattctttctcctctttggccgtgcaatggcggatgatcattaaaagattgtctttaaaccgctgcatctgtgtttcgacggtgcttctttcatattcttcctgattgtatgagcaggaaatgacgaagcggccgcctgtaaccatcccgctgaagctcagtgcgtataacgcctctgactcttcgctgacttgacgtcccatatcatatggagacggctcaaaccattccgttttcacttcattgtcaaactgccccaagtagttaaaactgatttcaggcgcggcgcctttttctgtttcatcggatgacagataccggagaattccgtatcctacacctttatctggaacgcgccgcactgtctcttttaccgttttaatgacggaagagacgccgtcttccttgctgatctgcagaatcaacggatattgggccgtaaaccagccgaccgtccgtgaaatattgacgttcggtatgatttcttcccggccgtgtccttctaagttgatgccgactttgccgttttccgtccattcaccgatcgttaagccgagtgcgctgagcagaatgtcgttgatttccgttccgtacggatgatgaacatctgtcagcagctgtgccgtttcttcctcagtcaattcacatttcacggccgccgtatgtttgacgagccgtttgtccggatcatggtctttcggcagcggccggagctcttccgcatctgcctgcgcccaataatccgcctgctttttcagctcttctgattgcgcaaacgtgttcagcgcctccgcccaatctttaaaggagtgggttttttgcgggaggacgatgctgttttgctgctgcgcctgtttataacctgaagcgaaatcctccagcagaattctccatgaaaccccgtccacgacgagatggtgaaccgcgattaacagatgatcgccttgttctgtccggtattgctccgcttttaacagcgggccgttctccagatcaagactgccctgaagatgatcggcaagccgctgaatctggcttttcagcatatcctcgtccgttccgtacagatcaacgatttcaaagcttgccttgcattctgtgacagggaggtatgtctgaatgatgccttccctttcttcacggtaaaccatgcggagcgcatcatggtgttcaatcaatgcttgcagggttttttccaccaggtccggatcaaagccgtctttcgcgtgaagcatgacggattggttccagtggtgtttgtccgtgaagtttttctcaaagaaccagcgctggatcggcgttaactccgcttcgccttcgacaggtccctggtcggcctgcttgccttccgtccgctccacataagagacgagctcttcgatggtcgggtgctggaagagatctttcatctccagcttgtagccgtgctggttcaggcggctcgccatttggatgcctttgatcgagtcgccgccgagggtgaagaaattatcgcttacgccgatctgatcaagaccgagcacttcctgccaaatgtcggaaagcagcgtctccatctccgtttccggcgctttgtaagcggcgcttcccgcttcaatgtccggttccggcagggcttttttgtcaatctttccgtttgcggtgaccggaagctcgtccatctccacccagaacgccggcaccatgtagtcaggcagcgtgtctttcagcgcggctttgagcgcttcaatatcgtcctgccgaggcgcgacataggcgcaaagcgcggtattgcccgctttgtcttccaccgccgtcaccgctgcgtcatgaacgtccgcaagctgggcgaggcggacttcgatttctgaaagctcgatccggtagccccgcactttgacctgctggtcgatacggccgatgtattcgatgccgctctgcgcgttccatttgacgaggtcgccggtccggtacatgcgctcgccgggcacgaacggatctgcggtaaaccgcttcgccgtttcttcctcacggttcaggtatccgcgtgccagaccgcggccggccacgcacaattcaccggcaatgccttccggctgcacctgatcgccgtcgccgagaatataagctctcgtattggcaatcgcccgtccgatcgaaagcgatccttcctcaggattgatgacgccgcttgtcgcgacgacggtgttttccgtcgggccgtagttgttgacgatcgtgtacggctgtttcaccgcccgcttcagcttgtcgccgccgacgagaagcatgcggagagaggtattttccagctccataaattgttcggccagctgcgtcggcaggaaggtgatggtcacgccgtgctcctcgaaatagtgatttaagcgggtgatatccagccggatcgcttcgtcaatgacgtgaagctccgcgccgatggtccatgtcgggaacatctcccagatggaggcgtcaaaaccgaagcccgcgtatttggcgcttttatcatccgccgtcatggcgaatgcgtcgtgatgccagaagcacaggttcaccagcgcatggtgttcgaccatgacacccttcggctgtccggtcgttcctgacgtgtaaatcatataagcgagatgatccgccgttgtttcagtctgcgggttcgcttcatcgttttcatcaagcggcaggctcagaatggagcgtccgccgtcaagcaggatcgtttctcctgtgtagccatccggcacgtccagcgcttcctgtgtgagaagaagcttggcgccgctgtcctgcagaatgtagctgatccgctcttgtgggtagtcggggtcaatcggcacaaatgccgcgcccgctttcaggacgccgagtacgcccgcggccatttccaaggacggtttcgtcaaaatgccgacacgttcgtcagccgtgacgccgcagtctatgagaatgcgcgcgatccggttcgcccttgcgttcagctcgccgtacgtccatttcgcgccgttatatgccgcggccggccggttcgcgtatcgggcggccgtttcttcaaagagacggtgaaccgttttgtcctgcggcacagagagtgtttttcctttccatgcgtcaaggagggcttgtttttcagcatcgctgatcagtgaaatctcaggcagctttctgtccgggctttccgccgcttgcttcagaatccgcaggaacccggcgctccacttttcaatggtttcttttttaaacagatcagtcgcatattcaaactgaaggccgagaccttcttgatccgtaaagccgccgagtgtcagatcgaatttcgccgtgccttggtttgactcatacggagtgatgcgcaggttctccagttccagtgtttctttatccggatcttctgtcgtcaccatcacctggaacagcgggttgcggctcatatctctcggcaggtcaagctttccgatcagatcctcaaacggataatcctgatgcgccagcgcgtcgagattggtttgtttcacccgttcgagcagcccggcgaaggtctgctctttttgcgtttcattgcgaagcgcaagcgtattgacaaacatccccggcatttcctgaacttcggcgctcgttcttcccgcggtcaccgaaccgataatgatatcgcgctgtcccgtgattttgctcaaaaagacatggaacgcggcgtgaagcaccatatgaagagtcgctcccgatgattccattaattcacgcaccgctttttccgtctcacgccccgctctgaaacggacggattgtcctttaaaactttgaaccggcggacgcggaaaatcggtcggcagattcaattcaggaagctcgccggaaaatgccgagagccaataacgctcatggtctttcatccgttcggcctgcccgggttcattctgccagacggcgaagtctttatagtgcaggttcggcgacggcagacttccgcctttgtaaaggtgagcgagctctttgaccagcatgcttctggacacgccgtcggcaatgatatgatgcatatccagcagcagcaggtgtttcttttcattcagtctgacaagagcggcccgaatgagcggagccgcgctcagatcaaacggcttaatgaatgcctgaatgataagatccgccttctcctcgtccgctgcttcaaaaatgtgcaggtcaatgtcagcctgttctgcgatctgctgcatcggctggcctttttgatcgataaaggacgtccgcaaagattcgtggcggttgatcatctgattgagcgctttctgaagccttgaaatattgacttctccttccatcagaagaacggacggcatattatagctgattgtctcccggtcaagctggttcagaacgtacatccgtttttgggcggatgataacgggtacgcgtctgcactgtctgccggtgtgatcatccgatatccctcagataccgccgatttttcgatatatgcggcaagcaggcggacagtcggctgttcgaacagcgcttttaacggaaccgttttgtccagttcagcctgaatattggcgaggagcatcattccttttaaagagtgcccgccgtaatcgaagaaattatcgtcgatgccgagcgtatccgtaccgagtgtctgtttccaaatgcggcacagcttttcctccaattccgtttccggcaaggctgaagcaatttgcgccgtttggctgacgcccggtttcgggagggcgtttttatcggtttttccgttggctgtgagcggaatgcggtctacttgcacgaaataggccggaagcatatgagacggcagtgtttcggaaagccgtttgcgaagctcagagcctttcagcccgctgtcggctttatagtacgcgcacagttccggcagcccgccttcgctgactgcgagaacgaccgcctcctgaatgccgtttacgcttaacagcacggtttcaacctcttttaattcaatgcggtagccccggattttcacctgatcatccgcacggccgataaattcaatcgtcccgtcaggaagcctgcggacgatatctcccgttttgtacatcaggctgtccggtgaaaaaggttttgagagaaatttctccgccgtcagctgcggacggtgaagatatcctctggcaagccccttcccggtaatataaagctcgccgcttgcgcccggaggaacgagctgcattgctccgtccaatacaagcgcgccggtatttgcgatcgggcggccgatgacgggacgctgctcatattgatcaagacgctccatattgatccgttccgcaatggcgccgatcgtcgtttccgtcggcccgtagtgattgatgaagtcggtatgggcgtatacgtcatgaaacttgcggacatcggacgtgatgatcttttctccgccgagcaccactaaacgaagcgagctgaaacggcgttctgacgtaaaacgggctgtattgacgatcatatggaacaatgacggcgtcagtttcatatacgtaatgccgtttttctgtatatactcaccaagctgatcaggcgcggtgtacgtctctttcggcacaatgtgcagctcgccgcccgcctgaagaatcgggaatatggccgtatagccgagatcaaatgcgtaagaagacagcagcacggatttgtcagcttcggtcaaaccggcttcacggctgaaccatgtgacataattgattagattgcggtgttccagctggacgcctttcggtttgcccgttgttcccgaggtataaatgatataggcaagccggtcggcgccggactccgtttcaagccggtcggcgctttcgttctgccattctccgtcttccattacgaccgtttttcctttataaacggcggccgcggtcatgtttctctcattgacgaccagaagcttcgttccgctgtcttcgagagagtagcggattctctcttcaggagtctccggatcaatcgggagaaatgccgctccggctttcatgacgccgagaatcgcggtaatcaagtcggccgaacgatccatcataatggccacgatgtcctcactgcccgttccgcaagcctgaaggtgtcgggcaaaccggttcgagcgttcatcaagctcacgatatgtcagacttgttccgcccgcaaccgccgtgagatcaggcgttttctgcgcttgccgttcaaacagcgaaacaaaagtgccctcaggcagatccgcttccgtccgtttttcatcagaaaggagcgcttcccgctcaggagcggacagcaggcttgcgtcggccagctgaatatccggattttcggcgcaggctttaatcagattgacaaaatgagcgctccagcggcggatggtttcgtccgcaaataaggctttcgcgtaatcaaagctcaatccgacctcttctccgcgctcagccgcttctaaggaaagatcaaatttagcgacatgatgatgcatggagtaagaagaaatctccaaatctccgagccgcagggccgggatctccatgttctgcatattaaataacacgctgaacagcggactccggcttgtgtccctcgttaacggcagtttttcaattaattcttcaagcggatagctttgatgctcaaaagcttgaaggctcgccgttttcacttcatccagaaattgcttgaacgtttttttgccggcaggatgcgaccgaagcgcaactgtgttgacaaacatgcccggcacgtcttggagatcaggatgctgtcttccggccgccggagacccgactatgatgtcttcctgccccgaatatttggacagcagcacttgaaaagcggctaacaagaacatgtacatcgtcgtatccgtatcagccagcagcttcttaatctgcgccgtcacctgtttatcaagcccgaagatgacgcgttccccttcaaaactgcgctcggcaggacgcgggaaatcaagcggcagatccagcaccggcagatcgcctttgaacgtatcaagccagtaagcttcgtgctgatcaagatttgctttttcacgctgccagactgaaaaatccttataatgaatctttggcagctcaagctccgtgccttgataaagcttcgcaagatcaccgatgaaaatgcccattgagcttccgtccgtaataatgtggtgcatgtcaatcagcagaagatgccggtcttctttaagccggatcagcttcgaacggaccagcggcgcacgattgagcgcaaacggcctgataaaggcttttgtcagctcttctgcatcttcttcccggccctcggcggtttcaagctcaaacgacacatttttatgaatggtctgcacgacttctccatctgccatgtcaaacgacgtacgcagtgtctcatgacggttgattaatgcctgcatggcctcttcaagacggtttttgtctactgatccttccagcagaagtacagcagggacgttgtagctcgtgctggcctgtccgagctgattaaggatatacatcctgcgctgtgctgaggaaacaggataatgcttctgataaggcgcttgtcggatcggttcaaactgctgttcctcctcggtctcatgctccaaataatgcgcaagctcctgaatggtcggcttttcaaataacactttaatcggcacttctttttgaaagtgctcctggattttagcggtcatcatcatggcttttaaagaatgtccgccaatcgtgaagaaattgtcagtcacacccgcttttacaccgagaatgccttcccaaatgtccgcgagtttctgctccgcttccgttttcggcgcttcgtattctttttgaacggcttcagcctgaggctcaggcagcgcttttttatcaatctttccgttcgccgtcagcggaaactgattcatctggatgaagtgcgcgggaatcatgtattccggaagtgattccgaaagcgttttgcgcaggtcttccggcgaaagggcttggtctgcggtaaagtaagcgcagatttcattttcatccgctttatttttccggatcacagccgcagattccgtcacattctccgcctggctgattttcgcctcaatttcgccgagctcgattctgaaaccgcggacctttacttggttgtcaattctgccgagaaactcgatcgtgccgtccggaagccacttcgccaagtcccccgtccggtatatcgtttcatccggtctgaacggatcgcggacaaactgcttctccgttaattcaggcagattcacatagcctcttgccactccgcttccgccgacacacagctccccgggcgcgccgatcggctggaggttgcggttttcgtccataatgtacgcagtggaatttccgatcggcttcccgatcgggatcgaaccgtcgtagtcctgatcaatgagaaaactcgtcgaaaacgtcgtattctccgtcggcccgtagccgttccaaagcgacagctccggtgatgccttcctcactttgctgacgatatgcggcacaagcgcatcaccgccgatgatgaggtgccggagcgtgttaaacatgccggcatccttttgggcaagctgattaaacagcggagacgtcagccacatggtcgtgatccgctgctctttcagaaattgggcgaatcgtccggcgtcaagcagcgtctcttttttcaccgggtgcaatgccgctccgttcagcaatgcgccgaagacttcaaaggttccggcatcaaagctgacggctcccgtttgcgccatccggtcttcttcatgaaccggcacgtaattcgaaggtttgacgagcctgatgatatttctgtgttcaatcatgacgcctttcggtttgccggtcgatccggatgtatacatgatatacgccaagtcgttgccgccggccgggagattcaagtctgttccgcttaccgtttcatccgcgctttcattcagcatgacaatcgggacttgcaatgtgcccgcttgttcttgatagtcctgaactgtcagcacgagccgaatcgagctgtctgccgccataaagcggagacggtcctccggaaaagccggatcaatcggcacataggcgccgcctgcttttaggacggcaagcattccgataacggtttccgcagaccggtcgttcataatagcggcggtccggcctttttccagcccgctcttcacaaggtgtctcgccaggcggttggccgcttcgttcacttcacggtaggtccattcgcgtccctcttcttttatcgcgatgcttgcaggcgtccggtttgcctgtgcttcaaacaaacggtgaacggcctcctcttccggaagcgccgttttcgtatcattgaatatctcaacaatctgccgctcttcttcgcctgaaacaaggccgagttcccgcacgggcgcgtcaggcgttccgaccgccgctttcatcatgcaggtcagatggtgcgccgttcgttcgatggcatcatgtgcgaaagccgctccgttgtatttgattttgacggtccacgtttttcccggatacacgatgagattgaaatcaaagctcgtctgctcaaaagcatgttcaactttaatggaaaagccgagtctttcctccatgcccccgttttccagctctttgtccagcggatagttttcaaacgcgaccaaatgattcaagaggctgccgtccagagcggagcgcttttgaatgtcatagagcggcacataatcatagcgctcggcttccacggcgtttttctgaactgccgccatcacgtcagaaaaggctgcatctttgtcaatcttgattctgacaggaatcgtattgatgaacagccccgccatcgtttcaatgccgttgatttctgaaggacggcctgatacgacggtgccgaacaccacatcgtctgtatagttgtatttgctgagcaccgcaccccaaacggcctgaaacaggttaggccccgtgacttgatgccggttggcggtctgctgaatctgcgcgaccagctcttcatcccagacaaaagaatattcttcattttggtagtctttcttttctgatgccagacggcccgggagcaggctcggctgttcgaaatccgccaggcggctgctccaatattgttccgcctcctcataatccctgcctccgagccatttgatatagtcagagtaaggtttgccctggcttcccccggcgggccggccggcacgaagcgcttcatagttttgaaacaggcttttcatcaaaacgcccatactccagccgtccatgacgatatgatgattgctccagacgagatacagttccttctcactgagcctgaacaccgccgctttaaagagaatatccttcgccagatgaaagccctgctgctgcacatcgcgtttatagcgttcaatatattcggtttggcgcgcttcatctaattgactgatatcttcatagtgcaccttcgtcttccgctctgctaatacgacttggcgcggtttttgaagctgctggtgcacgaataccgtacgcaggatgtcatatgtccgaatcagctcattgacacttttttcaaaaagctcaagctgaaagcttccgtgaatcctaagctctaattgtgtgaagtaggaggaagaatgcggatcaagcagcgcatgatacagcattccctcctgcatcggtgtgagtgcatacaccttttgaatcgattttttgctcatatgtcacctctgtcttttctgttagagaatttccattaatttatcaagttcatcaagcgtcagatcatcatcgccaagatcgctaggcgtaagctcaggtccgtcttgggccaggcagtgatctatgattttcaagaggtgccctttaaagctgtcactgaacgattgaatggttttttcatgaaattcgagagaatgataggcaaacgtcatcgtcatctgcccattttctataaatccgacaatatcaagcgcattcggcttctctgtgtcagggctcagcgattgtcctgacggcatcccggatcttgtaaataagccggaatccgacatctcattaaactggcctaagtagttaaagctgatatccggatcaatctcaaatgaaagaccctctttatgctcaggcgccgttacataacgcagaatgccgtagccgactcctttgttcgggatgtgtctgatgtcttctttcatttgtttcagctgatatgaaagatcgtcggcgtgcttcatctcaaggatcatcggatacatgctcgtaaaccatccgaccgtccgggtgatattcaggccgtcaagaatgtcttcgcgcccgtggccttccaaatgaacgccgatcgtgtcttcacccgtccactctttcagcgccagtccgagcgccgtgagcaggatgtcgttcatttccgtatggtaggcttcatgtacgtttgtcgtcagctgttcagtttgttcaggcgtcagagagaaactgaccgttctcgtatgtctcatgcgctgatcgccagactgcctgtctttcggaagctgagtgcatacctctttctcctcaagccccctccagtaatccgcttctttcagaaacgccttcgtatttgcgtattctttgattctctcagcaaattcggcgaatgaatgtgttttcggaggcagcgccggttcattgccttgtttcagctgcgtataaacggacgtgaagtcctccagtaaaatccgccaagatacaccatccacgactaagtgatggattgcgagaagaaggtggtctccatcttcagcccggaagagcccggccttcagcagatgtcctgtttccagtgaaatactgctttgaagacggtctgcttcccgttcgatacggtcctcatgatcttcagcaggtccgttcagctcaaagacgttcagttcaacagacgcatcctcaagccctctgtaatacggtttttgttcacgataaatcatccggagcgcatcatggtgcaccgtcaggacatgtaatgttttttctgttatctccggatcaaagccgtctttcgcatgaagcatgacggattgattccagtggtgtttgtccgtgaagtttttctcaaagaaccagcgctggatcggcgttaactccgcttcgccttcgacaggtccctgatcggcctgcttgccttccgtccgctccacataagagacgagctcttcgatggtcgggtgctggaagagatctttcatttccagcttgtagccgtgctggttcaggcggctcgccatttggatgcctttgatcgagtcgccgccgagggtgaagaaattatcgcttacgccgatctgatcaagaccgagcacttcctcccaaatgtcggaaagcagcgtctccatctccgtttccggcgctttataagcggcgcttcccgcttcaatgtccggttccggcagggcttttttgtcaatctttccgtttgcggtgaccggaagctcgtccatctccacccagaacgccggcaccatgtagtccggaagcgtgtctttcagcgcggctttgagcgcttcaatatcgtcctgccgaggcgcgacataggcgcaaagcgcggtattgcccgctttgtcttccaccgccgtcaccgctgcgtcatgaacgtccgcaagctgggcgaggcggacttcgatttctgaaagctcgatccggtagccccgcactttgacctgctggtcgatacggccgatgtattcgatgccgctctgcgcgttccatttgacgaggtcgccggtccggtacatgcgctcgccgggcacgaacggatctgcggtaaaccgcttcgccgtttcttcctcacggttcaggtatccgcgtgccagaccgcggccggccacgcacaattcaccggcaatgccttccggctgcacctgatcgccgtcgccgagaatataagctctcgtattggcaatcgcccgtccgatcgaaagcgatccttcctcaggattgatgacgccgcttgtcgcgacgacggtgttttccgtcgggccgtagttgttgacgatcgtgtacggctgtttcaccgcccgcttcagcttgtcgccgccgacgagaagcatgcggagagaggtattttccagctccataaattgttcggccagctgcgtcggcaggaaggtgatggtcacgccgtgctcctcgaaatagtgatttaagcgggtgatatccagccggatcgcttcgtcaatgacgtgaagttccgcgccgatggtccatgtcgggaacatctcccagatggaggcgtcaaaaccaaagcccgcgtatttggcgcttttatcatccgccgtcatggcgaatgcgtcgtgatgccagaagcacaggttcaccagcgcatggtgttcgaccatgacacccttcggctgtccggtcgttcctgacgtgtaaatcatataagcgagctgatccgccgttgtttcagtctgcgggttcgcttcatcgttttcatcaagcggcaggctcagaatggagcgtccgccgtcaagcagaatcgtatctcctgtgtagccatccggtacgtccagcgcttcctgtgtgagaagaagcttggcgccgctgtcctgcagaatgtagctgatccgctcttgtgggtagtcggggtcaatcggcacaaatgccgcgcccgctttcaggacgccgagtacgcccgcggccatttccaaggacggtttcgtcaaaatgccgacacgttcgtcagccgtgacgccgcagtctatgagaatgcgcgcgatccggttcgcccttgcgttcagctcgccgtacgtccatttcgcgccgttatatgccgcggccggccggttcgcgtatcgggcggccgtttcttcaaagagacggtgaaccgttttgtcctgcggcacagaaattgtttttcctttccatgcattgaggagggcttgtttttctgtttcattcaccaaggaaagctcagaaagcttcgcagccggattttccgttgcggcttttaacagttgaagccaataatgcttccacgtctctgccgtttccggtttaaacagcgcggtgttatattcaagcacaaacgttaagccttcgtctgtgtcctcagccgtcatcgtcaggtcaaacttggctgtttttctgtcaaacgggtggtgcttcagctcaattccttccatgaccagatcttcagcatttgcattttgcattgagaataccgcatcaaacagcggatttcggctcgtatcacgctgcacctcaaccttttgcagaaggtcttcaagcggataatcctgcgcgtcaaatgcatgtaaagcggtttgtttcacttctttaagatagtccgtgaacgttttgtccgcttccggatacgtacgcagcgcgagtgtattcacaaaaacaccgatgacgtttgcgagatccgcatgtgaccgtcccgcaaccggcgagccgacaatgatgtcatgctgtccgctcagttttgagagaaaggcgctgtacgacgccagcagcaccatgtacatggtagaatccgtttgtttcgcaagactgcgaagagccgacgtctgttcctcagtcagagaaaagaccagcttgtctccttcaaaggtttgcacggccggacggctgtaatcagccggcagcgtcaataccggaagctcgccgtcaagctcccgaagccaatgctcctcctgcttgcggtactgctctgattgaataaatttctgctgccataccgcatagtctttataatgaatccgcagcggctcaagcgtttcgccgccatacaagcgggacagttcatctatcagcacgccgactgaagcgccgtccgaaatgatatggtgcatatcaaacagcagcaggtggtcatgttcagccagcttgaccagccccgttctgacgagaggaagctgatccagacggaacggccggataaagctctgaataatccgttcagcatcttcttcagaggcttcataatattccatgtcgatataagcttccgcccatatacgctgaaccgtttctccatcctttatgtcaaatgtcgttctgaaggcttcatggcgttctgtcagctgtttcatgacggatttcagcttttctgcatcaagctttccttttaaacggagcacagacggcatgttatagcttgtttcagcgccttccagctgctgaagcacgaacatccgcttctgcggtgaagaaaccggatacgtttcccgctccgcagccggtgcgatgctctcagccgccttccgctcagccccttcaatcagctgcgccagcccagcagccgtcggagaagtgaacagatcctttaaggtaagctgcacgccgaatgtcttctggataagggccagcagtttcatccccgctaacgagtggcccccgatctcaaagaactgatcatggacgccgacccgttccatttgcagcacctcagcccaaatatccgccagtttttgttctgtttcattgcgcggcgccgtatatgacacggcattcgctgcggtcacatccggcatcggcagcgcccgcctgtcgatttttccgttccctgtaagaggcagttcatccaattgaataaagacggacggaatcatataagccggaagatccttcgccgtatgctccctcagctcccgggaagatatttccctgaggccgacaaaatacgcgcaaagaagtttgtcacccgcgccctgatccacagcgagcacaatgcattcctgaatctgatcatggctttgaagctgatgctcaatttcgccaagctcaatccgctgaccgcggattttcacctgatggtcgatgcgtccgataaactcgatatcgccattcggaagccatctggccaagtcgcccgttttatacatccgttcaccttccttaaacggatgctttacaaatttttcttccgtcagttcaggacggttgtagtagccttctacgagaccttccccgctgacgcacagctctcccgcgatacccgccggctgaatgcgtccggctgagttcataataaagacttccgtattgctgaccggtttaccgatcggaacggagagcgtatcctcttcaatgacatccaccggatggtatgtcgcaaacaccgtgctttccgacggaccgtacatatgaagcagttttcctttcccgactgccgccagcgcctttttgacatgttctacagacgctctttcgcccccgaacatgattttccgaagcgtcgtcagacaggacggctccatatcaacaagcaggtggaacagggccgtcgtaatcatcagaatgctgacgttctcccgtttgatcacacgggacaggcgcgacatgtccagcaccgtatctttcgggacgatcacaagctttgcaccgtttaacagcgaaccgaacatatcaaacataaaagcgtcaaagacgtagtttgacagaccgagcactgtgtcctcttcagaaacggtcaaatagttcgtgttttttaccgtccgcaaaatgttggcatgtgtgacgatgtttcctttcggcgttcccgtcgtgcctgatgtatacgtgagattggcaatcgttttggaatcaaacggcaatgctggattgcgagagtccttttcatagctcgcctcatcatcagcaagcacaatgacgccttgaaaaccggccttttccgcaagcggcttgaggctttgctgagtcaggagcacattcgccccgctgtcgcggaagaaatgctgaatccgctgaaccggatgctcaggatcaatcggcacataggcggaccccgcttttaacacagccataatggaaacaatcatgtccattgaccgttcacataaaacagccgcggttttcccgccgcctccgaccgaaagaatatgccgcgtaagcctgttggcgcgttcattcagctgctgatacgacagagtttccccttcgaactgaagagccgtccggtcagggttctttcgggcctgttcttcaaagatctgcacgatcgtttgctctttcgggtatgccgtgcgctccggattgaaccgctgtaattggttcaaagcctcccgttcagaaagcagatcatattcgctgattttcgcatccggctgagctgccgcactctccagcagacggacatagtgcgcaagcatgcgatccgcagttgagcgcttaaacagcttcgtgcaataatccaaatcgagcgcaatgccttccgctgtttcccgggcctgcattgtcagatcgaatttagcgatattgaagttggtttcatgaagagacagcgtcaggttgccgatctccggaattccgtccgaagcattttgcagactgaacatcgtgtcaaatatcggatgcctgctcatgtcccggggcacgttcagctcctcggtcagccactcaaacggataatcctgatgggaaaacgcgtccagcacctgtttgcgcacatgacctaacaagccggcaaatgtctgatcctgcttcacggagcttcgcagcgcaagcgtgttgacaaacatcccgataagcccctcggtatcagagtgatttcttcccgctgacggtgttcccacgatgatgtcttcctgtcccgaatacttagaaagcagcgtatagtatgccgataacagcaccatgtaaagggtggctccgtttttctcggcaagcttctgcagccgttcccgcagcattttcggcagcttggcggacacgcggtcaccttcaaagctttgcacctgcggccgcggataatcagggagcagctgaagcaccggcagttcgccgctgaagacttctttccagtacgcccgctccttcttgtagccttctttcgcccgttccgcctgccatacggcataatctttatattgaatgcgcaattcaggcagctgatttccgccgtagatgtcagccagttccttcagcatgatggaaatagacaccccgtcagaaatcaggtgatgcatatcaaacagcagcatatggcgattgtgaccgagcgtttgcaggccgattctgaacagcggcgcctcagataaatcaaaacggcgcacaaagtccttcatgacctgttcattcgttcttccgcgcgcttcgagcatttcaatatgaaacggaacatgttcgtgaaccacctgtctcggcgtgccgtcctccgattgaaacgatgttctgagcgcttcatgcctgctgattaaggcagaaaatgcacgctcgagcttttcaaggtctaaagcgccctcaatcacggccgcagccggcatgttatatccgactcccgcatcttcaaattggctcgcgatataagtccgctgctgagcgagcgaaagcggatagctcgcctgcttctcagccggctcaatcgccctgaatgccggtccttcgtttcggttttccgcataatcggcaagcgccgcaatcgtcggatgctcaaacaagtattgcagcggaatttcaacgcccatttgcttatgaattttcgtcagaagcgtcattgcctttaatgaatgaccgcctgactcgaagaaatgatcataaatgcccgccttgtccattccgaggacttcctgccagatgacggtgagcgtttcctccgtttcgtttctcggcgcggcatattcggatgagctgacagcctgcacatcaagcgcaaacagctttttgcggtccgccttcccgctcggcgtgagcggaatttcgtccgtttttgtaaagtaagcgggcaccatgtaatcaggaaggtgcttggacacatactccctgtactcggcagggtgaaactcggttcctttttcctgaacgatatatgcgcaaacatctaagctgccctgctgatccggccgtgccagcacgacggcctgcgccgcccccggagcttttctgagcaccgtttcaatttctcccagctcaatacggtagccgcggactttcacctgatcatcttcacgtccgatatattcgatcgtcccgtccggcagccagcgcgccatatcacccgtgcggtacatgcggccgcttccgttaaacggatcttgcaaaaacttctctgcggtcaaatccggaagatttaaatagccgcggcctacaccgtcacccgcgatatacagctcaccggccgtgccgtcgggctgaagccgctggtgcttatccaatatatacagacgggcgttgccgagcggttttccgatcggaacgtacgccgcctgttgattcattccgttatcggcggacacctgatgcacggacgcatctacgcacgtttctgtcggcccgtagacattcgtcagacgcggcgccctgcccgattgatgaaagaggttcatcagctgttcagcaacagcggcggacaggccctctcccccaatgagcatgtggcgcaattcaattccgctgacatctcccgccgcaaccatcatctgcagatgcgcaggggttccgtcagtggcttcaattcggttttgacgataatagtccagcagtgccgagccattcgttacagtcgttttcggcacgatataaagcgtctgtcccaaaagaagcgaggcaaaaatctgtttgacggacgcatcaaaatgaaacggagccaaaagcgccattcttaatgtctgctcaccgcattgataaatctcctgctgcagtgattgcaccagatgatgaacttgccggtgctcaatcatcacgcctttcggccgccccgttgtacctgacgtgtagatgatgtaagccagccggtctgattgtgtactgacaccgtccgcagccgtttcaaactgaacagcctcgtcaaaatcaatccgttcggcatccgctgcaggcgcctgtattccggcctctgtcagaacagccttcgctccgctgtcctccaaaatgtactgaatccgatccgccggaaagtcaggatctatcggcacataggcgccgcccgctttcaaaattcccaatattgccgcaataacacgctcagaacggccaagcagcaccgcgacaggagaatcggctgatatcccggctttaagaaggcgtccggcaattcggcctgactgttcatgcaatgtgcgataggacaatgttcggccttcatacaccaccgccggtttgtcagacagtgacttcactttctcttcaaacagccccggtatcgtcatctccccgcggtaattcaccggattaccggaggcccgtgtcagcagccgctctttctcggattcagaaagaagagtaagctcatcaattatgcgatcaggagatgaaatcgcatcttcaatcagcgtgatcaaacgttcagaaacagatacaatctcctctcccttgaatatgtcgctgcgatagtcaaaatcaatcgtcaatttcccagtgtcccatcgttccttcacatgaatcgaaatatcatttgtaccgcttccgctgaaaatagggtctgtcaggaaggacagattctcttttttctgccactgcatcacctggtactccagagccaccgtaaacaatctgctcagcgaacttttcgaagcgcgcaaatcattgacaagcaggttatacggatacttttggtggcggagaattttcatcagatccttcatccggcctttaacgaattccaagaacgactgtcctccgtcaacgcttgtccgcacaggaaccgtagatacgaacatcccgagcatctgcttttctttcgcattcgtccggtttcccataaacgtacccgtgacaacgtcatcccggccggtcactttgtagagataagtgatcaaagctgattggaacagagatagtacgctgactttatgctcctcgcagaatgaatgaatgcggccgtataagtcgtgaggaatttcttgagaaaaccgtttcgcatcaagacccgcatctgcctggctccgtttcagggacacaagctccggcacggtctcgaactgcccgttccaaaaatcccgatcctttttaaaccgcttcgactgcacatattcctgctcagtcagcacatgctcgataaaggaaggaatctccgtctgttccatacttgctccgcccgaaagctccaaataaatatcagtaatcgcattgcccagaatcgtcatggaaatcccgtctgaaataatgtgatgcacattaacgtaaaaccagacctcattttcgctgatggtatacacggaaaaacggaataaatcctgatcatataatgccagaggcttgcttgcctcgtcacgtccccattttgacagctcttccgcagagcagccggcttgcctgatgtctgtatgttcgatagtcagcggacggtaatcgctcacatattgaacgggctccccctcatcatcaagccgcagacggattctcatcgactcataccgccggacgaattcctgtatcgctttctcaacgtaatgagcctgtacgccgtcgtcagaaatgagtttcccgaacccggcaagatttgaaatacttgtgttcggatagaatttttctgtataccagatacgtttttgagcatttgttaaaggataaaaagttatttccatatgtgtgcgcctcccctttttaagataaaattgtcaattctcccttagaaacagcctccctcaatgtccctaactcattatcaagccaaaagaaccacttacctccaaaacgatcccgattcaatcaccgccgaaatccgcaatccactcacccgcacagtccgaaatgcggctcaaatttatgagaaatcaagacaagaatccaatgtttgtaagcaacagggtttacctatttcttcatgaattactatatatctacttacgttcactttatatgaaattattgtttttatcaccgaaaaatgggtgaaaagtttcattcggcacaccgaaaaaaattccgacaattccagagggtattttgcggcatcccgcaatttatttttaaaaatattatttatgtaaaattaaaaatctttaaactatagtataaatctctcgaatatccagttatggcagaatgaaaatagttttcatatatgagctgatggggaaaaaacagcgcaagaaccgaaacaggagatttaatcgttcgcaatatgatttcattaaaccgcaaaaaaagcactctattttacatagagcgcttcaaaaagattcctttattgcagttttatcaatgttgattaattccatatattcttttccccacttatacatggcgtccaaaatcggcataagggtctctccttgctccgttaatgagtactccactttcggagggacgacagggtaaacctccctgtgaacgatcagatcctgctccagctccctgagctgattcacaagaattttgtgcgtaatatccggaattaaagctttcagctcattaaaccgctttgttccttcttttcccaggtgccacataatcagcattttccacttcccgcctatcacggcaagcgtcaattccttttcgcaattaaacgttttctcatccattcggctcacgggccattctccttcctcttactttttgtacgttcatcatctattcatacacgcttacttttttacacaactttcatcagtttatactaccacgcagttttgctgaaacaaagcgcattgcctgcggggacagtatcctcaaagtaactattagacttcaaagtgcgtacttctcaacatgcggggcactctatagaatgtaaatacatgaaaaagaggagtggatataaagtggaattacagctggcattagacttagtgaatatcccggaagcaattgaacttgtgaaagaggtcgaacaatatatagatgttgtagaaatcggcactcccgttgtcattaatgaaggcctgaaagccgtacaggaaatgaaatcagcctttcctcacctgaaagtgcttgccgatcttaaaatcatggatgcaggcggctacgagatcatgaaagcggcagaagcgggcgccgacatcatcaccgttttaggagcgacagacgactcaacgatcaaaggggcggttgccgaagcaaaaaaacagcagaaaaaaattctcgtcgacatgattaacgtaaaaaaccttgaaacacgggcaaaagaaattgaccaactcggtgttgattatatttgtgttcacacaggttatgatcttcaagcagaaggaaagaattcattcgaggaactgacggcgattaaaaaagcggtcaagagcgctaaaaccgcaattgccggaggcattaaacttgatacgcttcctgaagccatcaaacaaaacccagatttaatcattgtcggcggaggcattacgggagctgacaataaagcggatgctgctgctaaaatgaaacagctgatttcacaaggatcatgaaaacgactgaatacttacatgaaatactcaatgaaatatcccgcaccgcagcattaatagccgacagtgaagctgacaagcttgcagatgagattttatcggcagatcaaatcttcacgtccggagcggggcgttccggctttatggctaaagcgttcgccatgaggatgatgcacatcggcctgaacgcttacatcgtcggtgagacgcttacccctcccctccaagaaggcggtctcgtcatcatcggctcaggctcaggcgaaacaaaaagtctgcttcatacagctgaaaaagccaaaagccttaacggcatcatcactgcattaacgattaaccccgattcaagtctcggcaaacttgcggatcttacgataacgattcccggctctcctaaggaagagaccggcggagacagaaagacgattcagccgatgggttctttattcgaacaaactcttctgctgttttacgatgcggttattctaaaaatcatggagaaaaaagaactgaattcagcagacatgtttacaaagcatgcgaatctggaatgatttactgacggccttcttatcagatggccgtctttttatcgtcttgttgcgcacggtcatgcaggccaaggttttcgggtcggacactcgcagacgaagatatcctgccggtgagcttatcgctataataagtcaattgacgatacggccgcaaccgttcatttctgaatagggaaacggcaaaaaacactttctgatcggatatttaatgaataaaattgatttgtgcggatggttttacagatattcagctgaattgcggctgagaaatatattttaacagctttacagccggccgattctgctttattcttggaccagctttacagcaatttaaaactggaggtgattgatactcttgaaaacattaaaagcactgctgcttgttcttatcatcattgccggagcagtcgcggccctgatcaagggtgatcttttctcagataacgagcagaccgttcagaagagtgattacgacaaagtaatcctatttccgtccgatcgatatccggaaacagcaaagcatattaaggacgcgataaaagaagggcattccagcatatgcaccattgacagagacggagtacataagcggcgtgagcaatctcttaaacatgtgcctgtcaaaacgggatacgatagggatgaatggccgatggcggtttgtaaacagggcggaaacaatgcctccgtagaatatatttctccggcagacaaccgcggagccggctcttgggtcggacaccagcttaccaatgatcccgacggaacgagagtattatttaaaatcaagtaaaaaaacaggaggaacagcgcattgaataaatcatggaaaccgcaagaactggccatttcgtatcatcaatttacaatcttccaaaaagattcagaaccgcctgttatcgattggaccgatgaagccattgaaaaaggatatgcggaagctgacggagctgtttcattcgaagcaaggagaaatacgagggcatttatcgtcttcaggcttaacacaagtgaaccggtactatcctatgagaaaaaagcgactgttccctttgaggctgtaaaagatggaattgagattgaaagcgtgatgtcaaagcggcttttctttaatattccgaaaggccgatacagccttacctgttattcagtgcctgccgaaatatccgatcttcatgcggatacgtatattattgatgcagacgcaatgtaaaagaaacccctgagagaatcatatttctctcagggaacttttataaacttttaccgtttgtttcaattacattctggtaccaataaaaactgttttcctgatccgtttcaagtctttttcatcttcttcatctcgattgatatacacaaaaccgtagcgtttttgatagccgttcagccagcttaaacagatccgtgaatgaccagctgcagcagccgatgagatgaactccgtcactaatagcctctctgcacagttcacccatactgaaggtcctttaccgtcttattccaagctccttcaacctgataggcagccgaagctgacccccatagaaatgtatcagggaacagaccctgttttttatgtatcatgtgtttcatcctcctgatgcgtatgatattgatatcatacgttttgaaacgcatttcagagcaatcccgataaaaacaaaaaagcatccggcttgccggatgcttaagaatgatgatgccgcttttccaatttatgaggcggaggcttcgggacaaagccattttgtttcatcatattaaagcgcctgtccatatgctgtttaatatgttctgctttttctttcggcaggaccccgtactcaacatatttggatatgacatgtttgcgtttttcgagcacttctttttcaagtgattcaatttcttttttctgctgttccgtgagtgacattgttgaaggcatttttgtttcggcgtgtgccggcattgtgaaaaccattgctgtaatgaaaaacgcagctaaagacaatgcagcttttttcatgactctttcctcctttaacgtttgttatatgttgctccctcatccattttttatgcaaaaaaagagcgaaattattcgctcttttcaatcgattcgtccggcagtgcgtatgtgacatacgttcccgctacaaaatcgtggattgaccgtttgtcttctctcattccgaccatgaatgcgctcacgatcacaccgattccaaacgtcacgccatatatcaggccgcccacaagcactctcaaaatcatagtaagaaagcctgcctggtttccgtcttttttgacgatgcggataccgcagatctttttgccgataacataaccgttccagtatacagggagcaaaataccataaagagtcaaaatgatgctgatcattgcgctctcattcgggtcttttcctgttgccagcataaaaataatcgccaaaggcactgaagtaattaaatagtcgagtacaacggctcccaatctgatccaaaatcccgccggtctgtaaatattcatcatgtttcccctcgctatggcttcaaaatcactttaatgtcgccatcttcttttttgtcaaatatatcatatgcagcaggagcttccgcaagactcattttgtgtgtaatgatatccgtcggatcaatttcattttgttcaatcatttgatacagcatcggcatcagatgaataacgggtgcctggcccatttttaaagaaacgttgcgtgtaaaaaaatcaccgagcggaaagccgtccgcttcagaaatgtatgcgcccgtgagctgcacggttccaaacttcttaacggcttctgatgctataagaatcgggctgatcgttccgaactgattcggtttttgctctgctttttcttttgaaagcggcgtgccgtccattccgacacaatcaatcactacatccgcgccccctgacgtttgttcatgcagcagtttcccgatctcatcatgttctgaaaaattgaaggtctctgctccgtttatgcgtctcgcatgttcaaggcgatgcgggacttgatcaactgcgataacccgtttagctccttttttccacgcgaatttttgcgccattaagccgatcggacctgatcccaaaataacgactgtatctccttttttcactccgctgtgctgaacgctccaaaaggcggtcggcatgacatctgacagaagcagcacctgctcatcttcaagctcactgtctgccggaaccagaaaagaagagaaatcagcaaaaggaacacgtaaatattcagcctgcccgccgggataattaccgttaaactccgaaaaaccgaataaaccgccggcatctgtatgaggatttggatttgattcatcacactggctttccatctggtgcttgcagtaatgacattctccgcagccgatgttaaaaggaatcacgacacggtcgccttttttcagctttttgacttgactgcccgtttcttcaacgattcccatcggctcatgcccgacaatataacccggatcggcgggtattccgtttttatataaatgaaggtctgaaccgcatatcccggttgcggtgattcgaacgatgacatctctctcatcttgaatggcgggtgccgggacttctttcacttccatatgttcttttccttggtatgtcaatgctttcacacttggtcagctcctttttcatcactccttcccttttcacctgcttctaaacttggccggtatgttattcggcccgctgaatatcccattgaaaaggatcttcaagctgcgaccaatcagaatcgaactcagactgcgtgagcaggcactgatccaattcctttgtaatggcggcttcatctaaatctgttccgataaacaccaagttcgtatgacgatctccgaattggtcgtcccaatcttccagaatctccggttcctgctttttgatctgctcctgctcaagtttcggcattgccgccacccaataagaaacaggctcaatcgaaaccgccggacccgcctgagacatcagcagcgcaaggctgttgcgggttgcgcaccaaacaattccttttgcgcgcacaatgttgtcaggcattgattgatgcagccagctgtcaaaacgaacggtatgaaacggcagacgccgcgagtacacaaacgaagtgatgccgtactcttccgtttccggagtgtgcgcttcatgacctgccgtcagttcctttatccatcctgctgatgaactcgcttcctcaaactcaaataaaccggtattcaatatgcattcggcgggcacttctccgcgaacggaccggatcagtctggcacggggctgtaatgcgcgaagaaccgtttccagctgttcaagctctttttcgcccaccatgtcgcatttatttaaaatgagcacatcacaaaactcaatttggtcaattaataaatcggcaatctcccgttcatcctcttctcccgccgcttccttccggtcaagaaggctgtcaccggactggaaatcatgccagaagcggtttgcatccaccacggtcaccattgtgtccagcctgcagaatgttgtcagatcaatgcccatttcttcatctatataagaaaatgtctgggcaactggaatcggttcgctgatccctgttgattcaatgacaatataatcaaacctgccgtctttcgcgagtttctcaacttcgactaataaatcttcacgcagcgtgcagcagatacagccgttggataattctacaagtttctcatccgtccttgacaaaccgcctccctgcttcaccaagcccgcgtctatatttacttcgctcatgtcattgacgatgacggcaatttttaaaccgttgcggttttgtaaaatatgattcaaaacggtcgtctttccggcaccaagatagccgctcaatactgtaaccggaatttttttcatatcaatagccccctgataaaatagaatgattacgatttatatctcgcaactgccttattttcatcatgatgtacatagttttaaatcgcaatcgttactatttattttgatgtattctccgtttaaaatcaagtaaaagtcagacacatcacacgttgtttgtccccatccattggtctgacacgcaaaacgtcaacgatttaattggtgaagccttggatccggactgtaaaatgcccggttttaagatgtgtgcggtacgaatcatccctatctaattttcataaaatttttagattttttcgtattttttgttacatttcataacatgcatcttaaatatttgtttttgctgtgctacgctgaaaaaaacaaagataaggagcggatcatctgatgggaaaaaaacagctagtccttgttggaaatggaatggccggggtaagagcgattgaagaaatactgcgtgtttcaaaagacgaatttgagattacaatattcggggccgaacctcatcccaactataaccgaatccttctgtcaaaagtgctgcaaggcgataccgacattcaagacattacgttaaacgattggaactggtacaaagaaaacaacattcagctgtataccggtgaaacagtcatcaaagtcgacacggaaaaccaaaccgtcatcaccgatgcagacagaatccagccttacgatgaactcatcctggcgacaggctctgtcccttttatccttccgattccgggcgcagacaaacaaggcgtcacggcattccgagacataaaagataccgacacgatgctcgccgcgtcaaaacaatataaaaaagcagccgtcatcggcggaggactgctgggtttggaagccgcgcgcggactgctgaatctcggcatggacgtgtctgtcatccacctcgccccattcctgatggagcgccagcttgacgcagcggcgggacgcctgctgcaaaacgagttagaaaaacaaggcatgacatttttccttgaaaaacaaaccgaagaaattctcggtactgaccgtgtcgaaggcgtacgctttaaagacggcacaagcatcgaagctgatctggtcgtcatggcggtcggcatccgcccgaatacacagcttggcacagaaagcggcatcccggtaaaccgcggaatcattgtcaacgattatatgcagactgaaattccgcacatttacgcggtcggtgaatgtgccgagcaccgcggaatcgcgtacggtcttgtggcgccgctctatgaacaggcaaaagtgctggccaaacatatttgcggcattgaaacaaaaccgtacgaaggctccgttctctccactcaattaaaggtatcaggcgtcgaggtcttctctgccggcgactttgatgaatcagaggacaaaaaggcaataaaagtgttcgatgaacaggacggcatttataaaaaaatcgtcctgaggggcaatcaaattgtcggcgctgttttgttcggagacagcagcgaaggcaaccgcctgttttctatgattcaaaaagaagcagatatctctgaaacctccaaaatatcaatcttacagcctcttgatcaggaagcaggcgtaagcatgaccgcggcgatgagcgacgatgaaatcatctgcggctgcaacggcgtttcaaaaggtgccattattcaagccattcaggaaaaaggctgcacatcaacggacgaaatcaaagcatgcaccggggcatcccgttcctgcggaggctgtaaaccgctcgtagaagacattcttcaatatacactgggctcagaatttgactcatccgcgcaaaaagaagcgatttgcggctgcacctcactgtcgagagatgaagtcgtagaagaaatcaaagccaaagggctctcacatacgagagaaatcatgaacgtgctcggctggaaaacgccggaaggctgctccaaatgccggcctgccctcaactactacttaggcatgattaatccggctacatacgaggatgacagaacatcccgttttgtgaacgaacggatgcacgccaatattcaaaaagacggaacatactcagtcgttccccggatgtacgggggcgtaaccaactctcaagatctccgcaagatcgccgatgtcgtcgacaaatatgagatcccgctcgttaaaatgaccggcggccagcgaattgatctcatcggcgttaaaaaagaagatctgccgaaagtatgggccgagcttgatatgccgtcaggctacgcgtacggaaaaacactccgcacggtaaaaacgtgcgtaggcgaacaattctgccgcttcggcacacaagactccatggcactgggtattgcgcttgagaaaaaattcgaagggctcaatacgcctcataaggttaaaatggccgtgtccgcctgcccgcggaactgtgcggaatcaggcattaaggaccttggcgttgtcggcatcgacggaggctgggagctttatgtcggcggaaacggcggaacccatttgcgcgccggtgatttgctgatgaaagtaaaaacgaatgaagaagtcttagaatacgcgggtgcttaccttcagtactacagagaaacggcaaactatctggagcggacatccgcatggcttgagcgcgtcggtttatctcatgtccaatccgtattaaacgatccggaaaaacggcaggagctcaacgacagaatgaatgagacactctctgtccacaaagatccgtggcaatacttccttaaagataaaaaagcttctaaagatctattcgaaaatgtcgtcacgacttcataaaacagtaagggggaacggacatggttaataaagatatgacaaaggtttgcataggcaatgtaaacgaattacccgaggagttaggaaaaaccgtatatatagaagataaagagcttgccgtatttaagctttctgacgggagcgtccgcgccgtcgaaaaccgctgtccccataaagagggcgtcctggctgaaggcatcgtcagcggagaatacgtcttctgcccgatgcatgactggaaaatttccttagaagacggaaaagtccaagagccggatcatggctgtgtcaaaacatacgaaacactgatcgaaggagagaatgtatacctcctgtattgatcaaagaccggatcacttttccaagtggtccttcattttttaaattgctgaagggatgacgccatcatgaaaaacggaatcgtatactttgtcggtgccggaccaggagacccggggctgatcaccgtaaaaggaaaacaggctctggagaaagcggatatcattttgtatgaccggctcgcaaacccaaagtttctagaatacgcctcaccggactgccggttcatttattgcggaaagctgcccgaccgccattttatgaaacagtctgagataaatgccctgctgatagaaaaagcggcggagggctacaccgtcgtccgcttgaaaggcggagacccaagtgtgttcggcagggtcggcgaagaggcagaggcgcttcatcagcacggcatccgctacgaaatggtgcccggcatcacctcgggaattgcagcgccgctgtatgcgggagtccccgtcacccatcgtgatttcgcttcgtccttcgcgatgatcaccgctcatgatacatcattgcacggcaggccgaatctcgactgggaagggcttgcccgaagcgttcaaacgcttgtgttttacatgggcgttaaaaatctgtcatttatatgcaggaagcttatggagtacggaaaatccccttccgttcccgtactcgtcattcaatgggggacgtggggacggcagcggagcgttaaaggaacgcttcaggatatccatgaaaaagttcaaagccaaaacatcaccaaccctgccattatcgtcatcggtgatattgtcaattttcaaacacacagctggtttgaaagcaaaccgttcatcggacggcatatcatggtggtcactcatggggatgatgaacatacattgacagacaagctgcgcgagtatggcgccgatgttattgaatggccgaagcggatcgttaaaaaaatgcccgcaaacgaaaacatcctgaaacagatcagcacctttgaacaactatttttcacatcacgccttgcggtatgcgaattctttgacacactggctttcaagcagatcgacatccgccgggtgaccgcaagcctgaatgcagcgactgaagccgcaaagacggaactgacaaaacggggctttctcctatccgaatggcaaaatgattctccgcattctctcattgtagggagccgtcaagcagcagaaaacttgccagactcaaaatcatgcctgttttatatcacccatgaacatatcgcggatgagcgattcacttccatgatcgaacgcacgatcagtgagtcacctctgcaaatgattatctgtacgggcaaagaatccgctcagcatttgatcagcgccggaaaacaaatcggcatatcaccgaacccgagaggaaaccgccctcccgtcatctgcatgggcgaagacctccccgccggctgcgggtttaccgccgtgaaaaatcaggaacagttatttgcgtttatacgaaatgaaatgaaagacatgctcgttcacagctgatacgccggaatgcttttctgacccccggacccagcatcggggggcagcccttttttattgtgtcaccaattttttatgatgagtcgaatacatcgccatctgatccgcatgcgggtccaaataggctttggcgctgttcactgcggtcggcccctccgtgaaaccgccggcaatcagtctgagcttgctttcataatgggcggcgtcaccggcgacaaacacgcccggaagattcgtgcgcatatgcctgtcagctttaatcctgccttcttctatctcaagcccccagtccttcatcggaccgagatcaattttaaacccgtggttgataatgagctcatcaagcttgatgacttcagaaagtccggactcagtttggcaaacggtgacgctctcgatccgttccccggtgccgttgagatgcttcagacgatacggcgcaagcacccgcacggaagaccgcttcattttcgccacgctgctttccaaaccgccaaactcctcacggcggtgcaagacggtaacagacgccgcaatcggttccagctcattcgcccagtcaaccgcggtatctccccctccggaaatcacgacatgcttatctcgaaacgcatcaagcttctccaccttataatgaaggttctttcctgaataacggctcgcatccgcgctgtcaagttcattgacctcaagcgtccccatgccgacggccaaaatcaccgtgcgcgtatagtgcttttccccttcggaactttcgagcacaatggttccgtcttccagccgttcaaatccggccacccgctgattcaacacgatatccggctcaaatgtcgccgcctgctccttcagctgcttaatcagctgttccccggcaatcccgggtattccgccgatatcacggatgattttttcaggaaaaaacatagacacctttcccccgagccgcggcaaaaactcgatcactttcgttttcagctcccgcatcccgcaataaaaagccgcaaacaggccgatcgggcctccgcctataatcgtgacgtcgtacacctcatgattttccgccatcgttctgcctcccgtttatatctatacttcatacttttttaattgagaatcaatatcaatgaaagtataacatatattgaggagcagtgtttattcatttctcatcttgcgggaaaggagtgattcagaagtgaggttctgagattgataagcgggaaggtattaaaactgaaaccagtacggcgactggtttcttttttatctctttttcatcagcatgatatcgagatacagctggcaccttgtcctgaagtcgtttaaattaattgatgtcatgtcaagaatctgtttgatgcggtagttcaatgtgttttgatgaataaaaagctgttctgcggctggttttgttttgcagttattgaggagatagatttctaacgttttcagcagttcggtgctgctttctctgtctttggcttttaataacgctaaatcatcgtttacatattccagtgaggcgtttttttcttcgatgctttcaagatagcggtaaatcccgagcttactgtattcgtacgggatattttcctggtttccggtaatttcggcggcctttataacttcaagggcttctatataacttttgccgagcttcaggatgctgctgtattcattgccgattccgatatagatgggagtggggatcttctgaaagtgaaaatgagtcagcagtttgtggatgaattcagatgctgccgaagtgccggagcttttttgcgagaagcttgcgacgacgatgacaatattggaatcaatggttaagacgtggctgactttatcccgcaaattcaagtacgatttgatattttcctttacatcttcgactgcctccccatccccatttgcggcgtgcaggacgactaccgaaaaaaccgacggcagcacggcgttcatcttttccgcttcccgcctgaactccttttcagaggagaattgctgaaagatcgcccgtttcaccaggtcttccgctctctcttctttttcctgtttcagccggttcgttttgtagatgatttttccgacatggaatgaagtttcatataaaaaatcgagctcctcgtccgtcaagtttcggtcgagctcctgaatccagatgtagcccatcacttcccctttatgttttgcgcttacaaccactctctgattcaatccgatactgtctattttttcgacacggaacggttcaggaacggttttcagcttttcgatcaccccgtccttcagaaacctttcaaaaatctgcacggggcatttttttgagaatatcgtctgctggttggcggagtcgaagtgattaatgtaataagaattataggcaagcaaaaagaaatccgcgctttccagaataacgggcttctgcaattcataactgatgaaatcaattaatttatcaatgtccgtaaatgaaaaaactctctctaaaagctcttccatacctatttctcctatgctctttttatctttatcatactctgaggggtgactttttgtatagaaaaaaattcatatactcccaaaacggaatgatccgaaagcctgtatcgtgaaaagaggaaaaagggcggtcccttcttcctctcgttccttgcttttattgagaaagtgtatcacggtagtcatgaaactgatctgtgacatcttttgacggagcctgtgtcaataagctgacaacaaatacagcggcaaggcttacagcaaagcccggaatgatttcgtacaaaaagtctgaaagactggcattcgcccaaatgattacggtaatcgctcccgcaatcatgccggcgagtgccccccatttcgtcatccgtttccaaaataaactgagcagtacgaccggcccgaatgaagcgccgaatcccgcccatgcatagctgacaagaccaagtatcgtgttgtttttctcccaggcgagcaccaaagcgatgattgacaccgcaagcactgccattctccccagaaatacgagttccttatcagaagctgaacgcctgaacatggacttatacaaatcctctactaaagaactggacgtaacgagcagctgagacgaaatcgtactcataatggccgctaaaatcgcagaaatgagaaatcccgtaataatcgggtggaacagaatgttgccgagctgaataaaaatggtttccggatcagccagcttcaacccgcgctggtggtaatacgcgattcccgcaagacccgtaaacagcgcgccgagtgcagacaaaatcatccatcccattccgatccgtctggcgcgtttgatctctttcacagatgtgatcgccataaaacgcacaataatatgcggctgcccgaaatagccgagcccccacgcaaataaagaaataatgccgaggacggtcgtccctttgaacatattaaacagttccgggttgacggaacggatatcggcaacggtttcccccgggccgcccgtatggaaaatcgtcacaatcggcacaagaataagcgccgcaaacataatgatcccttgaacaaagtccgtccagcttaccgccaaaaagcccccgaacaaggtgtaggcgacaacgacgcctgtcacgacccacagtcccgtgtggtaattcaaccctaaaatgctgttgaataagacacctccggacaccatgccggatgatacgtaaaaagtgaaaaagacgagaatgacgagacccgaaaacagtctgagaagcttcgtatgatcaccgaaacggttttcaaggaaacccggaatggtgatggaattccccgctttttcggtatacgttctcagtctcggcgcgacgaaaagccagttcgcccacgccccgagcacaagtccgatcacaatccaagcgccgcttaatcccgttgagaacatggcgcccggaagccccatcaagagccatccgctcatatccgccgcccccgcgctgagcgctgtgacggcagggcctaaagaacgccccccgagcatgtaatccgtcagatttgacgtccgtctgtaggcaaaataaccgataaacagcatgcccgccatataaatacaaatggaaataatcaactgaatgtttgctatggcatttcctcctccgctttatatgtttatggtgaaatggacacccccgcgaggaggatgcccattcagtccctcttaaaacatttcactgattgttttcgcctgcatgtgaagggccaaataatccgggccgcccgcttttgaatcagtgccggacattttgaagcctccgaacggatggtagccgacaatcgctcccgtacaattgcggttgaagtacaggttgccgacatggaattcctgtttcgcccgttcaatatgtttgcggttatttgtaatgaccgcgcctgtcaaaccgtattcagtattgttggccacttccagtgcttcatcaaagtttgatactttagaaaacgccacgaccggcccgaaaatttcttcctgcatgagtctggctttcggatcaaggtcagcgaagatcgtcggcttgataaagtagccttttgaatcatctccggtgccgccgcttactaaacggccttcttcttttccgatttcaatgtagctcatgatcttgtcgtaagaaccttggtcgatgacaggtcccatatacacgtcagcgctgtcagggcttgccgtcacttttgattcagtgatttcgatgacgcgctctaatacttgatcatacactttttcatggacaactgcacgtgaacctgcagaacatttttgtccagcgaagccgaatgctgatgtaaagatggattgagccgccaattcaatgtccgcgtcctcatcgacaacaaccgtatctttaccgcccatttcagcgataacacgctttaagtgctgctggcccggctgcactttcgccgcgcgttcgaaaattctcgtaccgacttcacgtgatcccgtaaacgtaatgatgcttgttttcgggtgatcgacgagatagtctcccacttccgctccgcttcccggcacaaagttgacaacgcccttcggaagacctgattcctcaagcacttctacgaacttcgccgcgatgaccggtgtcgcgcttgccggtttaagaacgaccgtgttgcccgttacgatcggtgccaccgtcgttcccgccataatcgcaaagaggaagttccatggcggaatgacgaccgttacgccggtcggtgtgtagacatattggttcttctcgccttcgcggctgttgaccggcttgccttttgccaattcaaccatctggcgcgcgtagtattccataaagtcgatggcttccgccgtatccgcatcagcttcattccaaggctttccggcttccttgacgagcagggcggagaattcgtgctttctgcggcggactttggcagccgcgcggaacaaaacggcagctctttcttcaggggatgtgtatctccactcttcgaacgctttcgcagccgcttcaatcgcctgctcagcgtgctcctgggacgcctttgacacttttccgacgacttcttctttgtctgcagggttaatggatacgattttcgcttccgtctctaccttttcaccgttgatgacgagcggataatcttttcccagatactcatttaccgtcgcaagcgctttcttaaattcttcaacgttcgattgatcttggaaattcgtgaatggttcgtgtttataaggtgtagtcattgtcatctctcccttttttacttcttagtcattcctttaaaggcgaatgcgatgtttgaggggcgctcggcgagccgtctcatgaaatagccgtaccagtcatccccgtaaggcaggtagactctcatacggtatccttcttccaccaggctgagctgggtttgcgagcgcatgccgtacagcatctgaaactcaaaacggtcgtttggaatgccgtgctcttcggcaagctgttttgtaaactcgatcattttgtcatcatgcgtggcaactgccgtataatgtccttttaaaagctgtttgcggatgagtcttttataattttcatcgacgtcgcttttttcaggataggccaccttttccgattctttataggcccctttgacaagccgcagaaacggattcagcgggctgaggtcatcaagatccttctccgttctgtacagataagcctgcaccacggtgcttacatattcataccggctccggaagtctttaaagatatccagcgttttctggcatctcgtttcatcttccatgtcaatcgtcaccatgactttatgtttttcagccgtctggaggattttcgtcatattttcatagacgagatcaagatctatatcaagacctaaagacgtcatttttaatgacacttgggaattcagctgttcatcagcaattaaggcgatggtctgcatgcactcctcggtgcgttctttcgcaacgtcaccgttgttgacaaattcccccaaatgatcgacagtaactgacagcccctggctgttcaaatgtcggattgtcgggatagaactgcggaaatccattcctccgatgattttgccggctgccacacggcttccccagcttcgcgccatcttattgagaaagctgctcttggataaaaataagaaaaaatctcttgtaatcacttccaaccttaacaccccgcaatctaagaagtatttgtatgagtctattgtaaatggacaaaacatcctctcacaatattctaaaaatacaaagattctgataaatttttgtggttttaccacaatcagcttcttagatagcaggcggattatgccgaaaaaaggcggacggaaatgacggcaatcgtcaatttccgcctttttccccccacgcctcttcgacggtctgaatcaatagctgattcagttcctccgttatgtcaggtttcggtgttttgatcgttttgacatagtgcccgatgcgttctatttcttcttctataaacgcgtgaatgatcatatttctcggttccggagccagctcctgaccgctttttttccttgtaagcagtgtattgatttcagaaatgagcgcttcatccgtcaataaggcatcggccagtacgggaaatgacatcggcggtacggagccgaacgtttcaatccatctgcaggcaaggagaggacgcaaaacataaaaatactttttaatcttcacttcactgccctgcaattccgttttttcattccgttttgccatattgagataatgataaatgccggcttcaggcgaaaaggcgcggattttcagttttcgaagcttttcagccgctgagaaagcttcataatagatcatctcagaagagagccattccaaaagaggcggatttgattttttaaaaagccgcagcgcttttctcagttcccagccgctgatgtcaagcatgtcatgaatcggctcttctatgacatccctatgcggttcgatcgaaaagtaccattcttttttcggcacatagagaaaccgcacatcgtagtcgctgtcgcttgacggaaatccccatgcgcggctccctgattctacggcgtaaagcaccttgacgccgtgctgtgcttcaattcgttttaattcttcgatgatcctttgttccatctgtatccgtccttttccgtgatcattcctgaaaaaagcccaagtacttgggcttttcgctgtcgtcagcctttcagatgcgctttcagaaaggccagcttttccttatggaaagaaggtatgtattcatgtccgaaataccggtaaaccttcaattctttttccgtttccagatgattgtaagcggcaaacaccgtcgacggcggagtcacgcggtcaatcagcccgatagacatgagcaccggaacttttacgcggtccgccagattcatgatatcaaaataggccagtgtattcatcgcggccttctccgtctcagggctgccgttctttctgaaaaaagagttaatctcaagatacggctcatcaagagcgacatcaatggcccgctcaaaattgcttaaataaggataatcggccgcaaccgctctcggaatgtcagatagtgccgccgcggcgattgaaagtccgcctccctggctccccccgatgacggcgattctcgtctcatccacttcatcaaagccgctgatgacttccaaagcccggacggcgtctaagtacacgccgcggtaataatatgtatctttatctaaaatccctttcgtcatccagccgggaacgtgtccgtgcggtgagacgcttgtatctgtgctgctgtgctggccgcggacaagcatgccgaacgcggcatatccgtgaagcgcccaatttacgatgtcatgtatatctccgtcataactcgcgttgtagccgtgatatttcacgatggccggatgcggtccttgccggtcgggaacggcgtaccatccctcaatttccgccttgccgaagcttcggtatgtcagccggaatactttcacgccgtcagccgggtagctttcagccgtcaattcaggctttgcctcttcctttgcaagctcatgtaatgatgatgcccaaaaatccgaaaagtcatgaggagcggttttatttggtttataggtttgcagttggtcgagcggcaagtcgtataattgcatatccgattattctcctttgttttataagatttaattttctgactctatcttaacacgattttacactcattttctaaacattttaataaacgtttgtttaaaagaaaacaaaaaagccgtacgctcacagcgtcacggctctttttacatcggctgatacagatcccagccgatttttaacgtttctacgatataatcggcgatttcttctggttccagattatccgtcgccacttttgaattatgtttatcatagatgctttggcgctcgttaaagagctgctgcatttcatccatggaacggttatgcagaacgggacggctttcaatcagcaggtcagcccgctgcttccaattctcccatgataaatcaagatggagcacgagacagttttcgaggcagcactgtctgattgcctcttgtttaaacgaaccgcccccaagcgacacgatcttgaatttcgtattgcggcagatatctaatatatagtccttttcagtttgacggaaaaaggcttcaccttttttctcaaacatttcagggatggacatattgaaatctttctcaatctgcaaatcaatatcaatgaagtctctgtataatttcttagcgaccagctggccgattgttgtctttccgacacccatgaatccgatcagtacgatgtttctttctcttacgggaatggcacgttttgcgttcatcttcggcgaaatcctcctaagaaatgaaaaagttatgtttattatatgataacccaatattgaaatatagagataatgcaataaaagaaaacccatcctttataagaagagatgagtttttctttctatcggagcgtaatgcgttccacctttccgacaatgaaaatataagaaaatgccccgataaatgcgacagcgccgacaaacagaatcgctccgttatatgaaccggtcgcagaaacgataaacccgatgataagcggggtgataatgccggccatattggcgaaaaagttaaacacgcctcctgccaatccgattgtttcgcttggcgccacctcactcagcatcgtccaggatatattggacatgccctgcgcaaaagaagcaatggataagatcgtcaaaaccgcaggagcagaatccgtaacattcgcgagcacgatggagcctgtcagcagaagaccgaggatgacgggggttttccgggcaacgttcaccgacacgccccgtttcatcattccgtcagaccaatatccgccgaacaatacgccgaaaaaggcggcgatatacgggattgatgcggcgaagccgacttttaagaatgccatgtgctttgcctccgccagataagtcggaaaccatgtcaaaaagaagaacagcgtggaggctacggcgaattggccgatatacaagccgacaagcttgcggtatttaagaagctggacgaaatcccgccacgtgatcctgccggctgattcagacacctctgtcagtccgccgccttctctaatataatcaagctcttcccggttcactttccggtaccgattcggctcgtgatacattttgaaccagaaaacggagaaaacaagcccgagcacccctgaggaaataaagacggcgcgccagtcaaatgccgttaacacccagaataaaaccggtgtggcgaacgccagtcccacatattcccccgccgtataaacacccgtggcaaaggcgcgttcccgccttggaaaccatgtcgtgacaatccgattgtttgccggaaacgcaggcgattcagccagcccgataatcaggcggcagccgaataaaaatccgaaactggctgcaaaagcctgcactccggtgaaaacagaccagatcattaaagaaacgccgtacgtccgttttgacccgaatttgtccaaaatgagcccgccgggaatctgcatacccgtataggtccagctgaatgcggaaaagacgacgcccaaaagcgcggggcttatgttcagcgatgtctgaatggacggggcggcgatggatacactggcacggtctatataattaatcgcagtgataaaaaacaaaagaaacagtatcacataacgagcgcgagtcggtttattgcggacgggactgaagtccgtcagctccgtttcatttttcaatggcttctccccccttactcgaatgaaattaattgtacaacacttcggtcaattatttaatactttgacgcaaaaaagcgctaaacaatttgtgcgccgcactgacactccgcttataaaagtgtctgcccttttcacctgtttatccgtatctcacccggggaaaagtacacatatgatagacagttacgggaggattaccgatgaaactgagtttttgcacgacaggatttaaaaaaaagcatattttcgacatcatttctttcgcgaaggagcactcctttgacggaatcgaactgtggtacggacacgctaaacaatatatagaggaaatcggcccgctcgacaggcttgatcagcagcttcaggaggaaggcctcggggtgcctgccgtcagtttgtacactgacttcgccgctcaggatgaaaggcaggcgttaaaggatgttcaaggggcattaagcgcggcacgacagctgcacagccccttgatcagagtctttgccggcaatcttccttcgcatcggacgtcaccggaaaagtggcaacgtgcggttgatcaatttcagcaggcggcacggctcgcagatgactatgaagtcgatatcgggcttgagattcattacgatacgtacgcggatacaccggaggcggcactggcatttttggaggatgtcggacatccgcgggtccgcaccatttttgacggctccaacctacacgtcaatcacgttgaccaaatgtccgctttagaaaagctgtatcataccgtcagccatattcatctgaaaaactatcactggaattttgacaactggtatctcagcaagccaactccgattttccaaggagatctcgatcaaaaagcatttttaaaagagctgatgaacagacaatatgacggttttgtttctcttgagtattttggagaacatgcctttacgcatataaaggaatcgctccgggaatatacgtctgttttttcccgctgactcttcgatcgaagggtcttttttttgtatcatatagaaaaagggggatatcatgatgatcatttggataaatggggctttcggttccggaaaaacacaaacagcgtttgaactgcacagaagactgaaaccgtcttacgtatatgatcctgaaaagatggggtttgcgatgcgttcgatgataccgccggatatcgctgaagatgactttcaaagctaccctctgtggcgggaattcaattacagcatgctttcctatttgtcagatacatatcagggcatcatcattgtgcccatgaccattacgaacgatcaatacttccatgacattatcagcaggctgagacaggatggccggaccattcaccactttaccctgctggcttcaaaggaaacattgctgaaacgcctgcgcaccagagcggaaggaaaaaactcctgggccgcaaaacaaatcgaccgctgtatcaacagcctgtctgatagcctcttcgcagaacatctccatacagaccaaatgtctattcagcaggccgcagaaacgatcgctgcccaagcaaatctgcctcttgagcctgattcgagaggcagccttcgaagatttaccgacaaattaatggtgaagctgaatcatatccgtatcaaataaaaaagcgttttgaaaacatgtccctgacccatgcaaatggatcaataaataaaaagtccctccgaagggatgtttttttcaatttaagaaaaaaattttagaaataaaggaggaattatatggataatcgtctaattattaacactgtaatacatttcatttgaaaagggagtgttcgaaatgaaattcaaaaaagtgttaaccggttctgcgctgtctcttgccttactgatgtctgccgctcctgcctttgccgcatcaccaacagcatccccatccgtggaaaatagcccaatctcaacgaaagcagatgccggcattaatgccatcaagcccgttccaagccctaacggtattttcgctgcttctttcgaactgaatggtacaacatggatttttaaatacaaatactatgacagcagcaaagggtattgggtagggatttatgaaagtgtagataaataaaaatgaaataaacaaaaaacctccctttcaaaagggaggtttttttcattctatttccaccaatcatcaaacatcgatgccggcacctggcgcttgtgctccgtactgaggtagcgtttttccagcgcttcaatcacttcggaagaaacatccttgccttctaaataatcatcaatgtcattgtatgtgatgccgagctcggtctcatccgtctgctgcggtttttcatcgagcagatcggccgtcggtaatttcaaatacaggcgttccggcgcgccgagttcttctaataaacgtctgccctggcgtttcgttaatccggtcagcggcagcagatcagctccgccgtcaccgtatttcgtgaagaaaccggtcaccgcctcggccgcatggtcggttccgatgacaagcagcccctcttgtccgccgatggcatattgagcgatcattctcattctggcttttacatttcctttgttaaagtcagacagctgatcgcccgtgtcttttttatactgatcagcgaacgcgctgacagcggacttaatatcaaatgtccatgatttatcaggtttaatgaatttgagcgccaattgggcgtcatcctcatcttgctgtgtgccgtgcggaaggcggacggcgataaattcagcgtttccgccttcttctctgatgctttcagccgccaattgggcgaggcgtcccgcaagcgtggaatcctgcccccgctgatgccgagaacaaagcctttggcacctgtttttttcaaatattgtttcagaaagttcactctgtcctcaatttcttgtttcggatcaattgagggttttacatgaagatcattcataatttgtttctggatgctcatcccaatcactcctcctgcattgtttctttatgattcatttcccgttcatactgaaaatgaatcatgccactatgtacgactctttgttaaatatagcacaggtgcagtttttaagtgaaccaaatacaccgggatcagctgatttccacccgcagcgccgtgatgctgtccccgttgcatttccctttttcgatcggacaggatgaaaacgcgacgacgagatccatttccgcacggagccgtacataatcacccgcgtcagaaagaggggtttcgactgataagttccccttctcatcgagcaccgtgttcataaagatggcaaatgggtaatgcatatgcggccgcggcaccccgaacggttcaagcgccccgctcatattgtcatagcacgtatcctggagctcgtccttatgctttccgtataaaagcctgttcatatccggacggcaggcgggaagcagcaagtcgtgcttgccgactgtatcctcaatcagcgtcagcatcggcttgtataaatttgaataaatatgatcacctgtttttacatgaatggactggttggcatcgatcgtcgcgccctgatcaagatgttcataaaagtccttggcatgatacgccgtaaaatcagccacctgctgcccttccacatcgactacttttataatctgccctttgtgaaccttcaggccgagcccttttttcggcggtacgataaattgctgtgtcatcagactgctcctttttttcttctattatgaaccccggccgtttgtttcatgtaaagcaatttattggatgtatattccccttctgacggccgcaatctaagctttgataaaggggttgaacttcatgagtaaatcacaggaccagcctaaagggaatctcgcttggtggcagctctccttaatcggtgtcggctgcacaatcgggacgggcttttttctcgggtccagcatcgctattgtcaaaagcggatattccgcgctgatctcatttcttattgccgggcttggcacctattttgtctttgagcagctcgcgaagctctcggccaaacagcccgaaaaggggtctttttgcgcttatgcgagaaaggctttcggcacttgggccggtttcagcaacggatgggtgtactggtcgtccgagatgctgatcacgggaagccagctgacagcgatctcgctgtttacgaagcattggtttccgaatgtgccgctgtggattttcgcctccatctatgcggtgctcggtcttttgattatatttacggggctgtccgtttttcaaaaaacggaaaatgtgctcgctgttgtcaagacggcggcgattgttatgtttatcgtcatcgccatattggcgctgtgcggtatattttctcataaaccggatgtgcaggtgccgaacgaatcaaaggatttgttcccgcacggagcgatggggttatggacgggattgatttatgcgttttacgccttcggaggaattgaagtcttggggctgatgaccgtgcatttgaaaaagccggaggaagcctcaaaatcaggccggctgatgcttgccgttcttgcggtgatttacgtcatttctctcggcctggcgctgctgttagtgccgctgggcaaattcaccgaacaggacagcccgtttattacatcgctgaagggttttcatttagatatcattcttgatatttttaacgggatttttattattgcgggattttccacgctcgtcgcctcgctgtttgcggtgacgacattgctttgtacaatggctgatgacggagatgcgccgaaatgcttcagattaaaggaaaacaaaaaaatctgctggcccgcgctcggattgacgtttgccggactcatcgtctccatcatcctgtcattggtgctgccgaaaaacatatatgaacacatgacaaccgcggcgggcctcatgcttctttatacgtggctgttcattttgttctcgggcaagaaactgcttgaaacgacaaagatgggaaccgtacagattgttatcgcccttgtgctgattgtcgcggccgtctccgggacgctgtttgagaaatcgagccggcccggttttctggtcagcctttgttttctcgccgtcattgcgatcgtgacatggatcgtacaaaaaaagcagggacacagccctgccggatcatagcttatttcgtcggtttaaacagtctcttcaaataagaaaagggacactttgacacttgggtctcatcatcacggaggaaatattgcttccattctaaattgtcttttcctccgtaccaccccaatcggggatgaagaggggcttcatcatacgcctctaagcgttttctgatcagccggctcatgtttcgtccgaacgcggttgaatcatttaatccttcaaaaacccatctcggctgaaacgccagcataaaaaacgggaagcttctgctttgtctcgcttcatgcgcaggcgtcgcgcacagaataaaatacggctcgccgtcaaagcagaactcccatttataatgttcagggtcttccggtatgtcttccggccagtctttcgggtcgcagccgctcagccggtttaaaaaagaccagaacagctcttcatacgcctcaacggaataatgctcagctaaatcctcaggcgtatcaaaaatcacaagcagcgacgcgtattttccggtattccttgagatctttccgtactcggacagcagcatccccacttcctccggggttccctcttcgcggggatcacccgcaaaggatatccggagctgatctgtcaaaaatccctgacgtccgggaatgcacggaaacgtatccgctttatcgcctactttttctgatagaagctcaaaagcgattctctgccaatttggcagatccaataacttttcctcaaggcaactttttgtgtacagcccgcttgccatcggcccacctccagtatcgtcaggatacgttatgatggagacaggcgataggtgacagtccttctatttatgagatgagcatttgaatcccctgccagccgaaataaaatccgaaaacgatcaaagacacacccgccgctcccgtcagccagcgaagcgctgtttcatgaagaagatttctgaaagtgctcgcagcgaccgccatgcagaaatcccagatcaaaatgccgagaagaatgccggagctgtaaatcaaaagctgatttgcatcgaaggattcagcggttttggcgagaatgctcccgtatatgccgagccagaataaaatgctcagcggattggaaagagaaataaaaaaccccgcgccgaaagttttgtaaaaagccggttttccttttccgcttctgacattcatggcttcccttatattttttaacgtttcgactcccgtgtaggtcagcacgaaaaaaccgaagagccacaaaaacgtttttacaaaaggagcggtcaaaaattgagacagcccgaaatagatcaaaatcatatacagcccgtccgcggccatggcgccgagaccgaaaatccatgcatgccaaaagccgtttttgatgcctttgtcaatttgcgccgcattgaccgggccgacaggtgctgacaatgacagcccgagaacgatgtagcttaaaaagatgttcattggcttccccctcattcatgcaacttgtacaagttattcatgaatgggccgtgctatgatacattattttaatttctcaagctcgtcttccatcatgtccgtcgcttttcctaaaaaatcgaatatcagccgcagttcttcttctttatattgccggcaaaggctgatcgtggactgggataaggagctgaataattgcttcacattcgcttttccggctgtcagcggcacgatgatcacccgccgtttgtcttcggggtcttttttcctcatgacatatcccgctttttcgagccggtcaatgagcgccgttaccgaacctgtgctgaggccggtttttttcccgagctcgcctgcggtcatcgggcctgcttcatttaagatatcagctgatttcaaatcggtcggaaacagaccgagagattgagcggccgcctgatgaaacaggatcgtccttgtggccatcttccggaataactgtatggcggtttcctccgtctcgcttctggtatttcttgttgacaactgacaggcctccctataaaatcaatttatcttgacgatcaagataattttcggcaaatctaatatgatcatagcaaatttaatgatcaaaagtaagtatgggaggaaaaagcatggaacaaacagccgcgaaggacgcctcgacgaagtttgtcgtcatcggtcttttgctgggcattttaatgtcggctatggataatacaatcgttgccactgcgatgggaaatatcgtggcggacctcggaagtttcgataagttcgcgtgggtgacggcatcatacatggtagccgttatggccggtatgccgatttacggaaaactgtccgatatgtacggacgcaagcgtttctttttattcggtcttattcttttcttaatcggatctgcattatgcggaatcgctcaaacaatggatcagctcattatttaccgcgtcattcagggaatcggcggaggtgcgctgatgccgatcgccttcacgatcatttttgatttatttccgccggaaaaacgcggaaaaatgtcgggcatgttcggtgccgttttcggcctttccagcgttctcgggccgcttttaggcgcgctcattaccgactccatcagctggcactgggtgttttatatcaacgtgccgatcggtattttatcattgtttttcattcttcgttattataaagaatcccttgaacacaagaagcagaaaatcgactgggccggcgcgattacgctggtggtttccattgtcggtctgatgttcgctcttgagctcggcggaaaaacgtatgattggaactccgttcagatcatcggtctgttcgctgtgttcgccgtgttctttatcgccttttttatcgtggaaagaaaagcggaagaaccgattatctcattttggatgtttaaaaaccgtttatttgccacggcacagattctggcgttcctttacggagccacatttgtgattttagcggtatttatcccgattttcgttcaggctgtgtacggcagcaccgcgacgagcgcgggctttattttgacaccgatgatgatcggttctgttatcggaagtatgatcggcggaattttccagacgaaagtgcggttccgtaatttgatgctgatttccgtggtcgctttctttatcggaatgctgctgctttccaatatgactccggatacggcgcgtacgatgctgacggtattcatgctgatctcaggattcggcgtcggcttcaacttctcactgctgccggctgcgtccatgaacgatctggagccgcgttaccgcggaagcgccaactcaacaaactcgtttttgagatcattcggtatgacgctcggtgtgacgattttcgggaccatccagacgaatgtgtttaccaacaagctcacagattcattcagcggcatgaaaggagcgggcggcgcgatgcagaacatcggaaatccgcaggagattttccaggccggcacgcgcgcccatattccgccgcacattctggatcgcattattgacgccatgtcgcaaagcatcacatatgtattcacgcttgcgctggcgccgatcgtcattgcggccgttaccattttgtttatgggaaaagcgagagtaaaaacctctcaggaaatggcgaaaaaagcgaattaaaaaaagcagtacatggcgtttgtcatgtactgcttttttgtttactccgcgaaatgcggagcgagaatgtctttcagcacgtttgcgctatggttgaattgacgctgttctgtttcattcagctcaagttccgtcacaccggcgatgccgttccgattgacgacagccggaatgccgataaagacgtcgtttacaccgtattgcccgtccagatatgtgctgacggttaaaatactgttttcattacgcaaaatcgcttttgtgatgcgggcgaggctcatcgccactccgtaatatgtcgcgccttttttctcgataatatggtaggcggcgtttttcacatcgtccacgatctgatccagctcgtcctgtttgtaagctgcatttttctccagcaattgctgcaccggcactccgccgatattggcgtgactccatacaggaagctcggtatcgccgtgctcgccgataatgtgggcgtgtacgttttgcggagcggcgccgaaatattcactcagcatataacggaatcgcgcagaatccagtgtcgtgccgctgccgatgacgcgttctttcggcagaccgctgaatgtccatgtcgcataagtgagaatgtcgaccgggtttgtggcaacgaggaagatgccgtcaaatccgcttgccattacttcaccgacaatgcttttaaaaatggcgagatttttttcgaccagctcaagtctcgtttcgcccggtttttgattggctccggcacagatgcatacgatatcggcatccttgcaatcttcatatgttccgtaagacgttttcaccggatgaggtgcaaatgcctttccgtgatttaaatccatgacatcgcccatggctttttctctatttacatcaatgatcacaagctcatctgtgatcccttggttaattaacgcaaatgcataactgcttccaacaaaacctgctccgattaatgctactttgttcactcgttcgttcatcatgtatgctcatcctccagtgtttcgtggtgtctgtttttaacttgtgaagtatttcacatttatattgtgcaacacttcacaaacttttgcaagagaaaagtttgatttttggacaaaaaatatcgatgatggtttccagattgttgacaacatcctaaaacggaaccgttttaggatgttgtatcttttcagcgtgattgaagacgtgctgtccttttcccagaagcgagggtttgccggcacgctgatgtgatgatagccctatccattaatgcggaagataaccgtttaaaccggagttgttatacaaaccattctgcacataatcaaatccgggctggttctgcccgggcacttgggcgctgccattgttaaaaatcactttggcattggccgtatccgcattcgcaggcagcgtcagcgtgtaaattccatttgcattcttagtcattgctttccccggccacgatccggttaattctatggccctgcctccatcatgtttgtaaatataagcatttacctggccccaatgatccggattttgatagccaatgatgttggtttgggcctggtcttttttgacaaacgtgtattcttgagttctctctgcaccctcgccgttcgttccggttaacctgatgttgtatgtcgtgccgattggatctcctttcccgatcgttaatcggtctccatccttaaatgctgtctgctgcccattattgatttggtaaacggcttttgctgttttcgcatttgcacgcagggtgaccgtcagctgatcattgaaagaatggactgcccccgtttggtaattctcaagaaagacatgaggcgcatttccaatatcatcagaataaagaacagccgcggatctggcattgatcgtacctgtcagtttgccgttcgctacttgaaatgaaccggcgccggccctattatcatacctgccgtcaggcaatttcgttgaagtattgacggtgacagaagacgatcccgcattagccagcacaacgccttttgagccgcgctgattcataaatatttgattgttcccattcggattcgagagttcctcaggctgcccggccattacattgtgaaattgattgaccgcagtgatcgcctgatctttaaataaggcgctcccgcgatctcctatttgactttttccgggaaatcgcaccccatttcctccgccctcaggtctggaaaagaaaagaggcgtgcttcctgagcgggaaccaatcactgcccagcctaaacggatatcgtcatcactcatccatgtggactcttcctcatcattggcatacgtatcatgtgattccacccatgtgaccaacttgtccgcagacacgtcagatgcataatgggagatattcgacacactcagattacggttctttaaagcggatctgatggaatgcccatagttagaagccgtcacattcatataattcgcataagcagtatctctggacgcgctgtcttgcaggatttctccgtattggaactccgccgatgtatttgtgatattcggccaaaatcggctgccgtaattcccatcatccggaagctctatatgcttggcggcatcatagcggaacccgtccgctccgtcattcaatgctctttccaagaaacgtttcagataggtttgcacctcagtattctgtgtattccaatcatacagcccaagcaatgaattttgagtgacgtcccacctgtccgaccaatttttaatttgtgtgtttccatgggtccagtttggaatacgcttaatctcgtcagaaatcgcggcgtaatcgctggtggtatgattgataaccgcatcaacaatgacttttacgccatatttttccgcggctgcacacatgtccttaaattcttgttcagtgcctaagtaacggttgccgatttggtacgatgtcggctgatacagccagtaccagttcctcatgcttttatctccttggttcccttcctttacttggttaatcggagacgtctgaatggctgcatagcccgcatcacgaatctctttcatattttgtgttaacgtattgaacgaccaattccaggcatgaaggatggtcccgtttttgaccgatgacgcggccacctcattcgatttgtttgcagtttcagcgtttgcagccgccgggcctgacaaaaccaaatgaaacagcaataaaaatccggcgaataacggcagtaaagaggttttgaatcgtttttcaaacatttttgacactccttatttcatttttgaagactgactgcggagtcaaaaattcctcttactctttcttcagctcctttcaactgttgtgaagactggagaattctgttaacgcttacatttcaacttatcacactctctctatcaaagcaacgcggcagagtgaattcaaatctatattcctatcaattaaaaagacttcccgctttcaaacaaaaaaagaaaccacctgtcaagatgatttcttttttatttcttttatcgctcttctgtaagacagcttcacaatgacataccgaagcagaaacagaatgcctccgcagacgataaaaagaaagatcattttcagccaagcaaagaatgtatggggaaaccccctgtcgtacatcgtaagcgccgccaccgcaaaagtgactgctattgaatctatccgctgctgcttcacccgctttttcagttcttctttggtgtctattctcggcatgagcattcccgacgctcccgccctgatgcaataataaacaattataatgaagaaaaccgccaagctcccggcccattccctaaacggacagttcagaacaagtccgcgtacgatgatgtcaagcaaagacagtgtgcccacaagcattccgacttctgaccaaatcattcgttctttctctttcacactctcactctttccattcacgtttgaaagtctgttccgacgctgattcatgacttcctcccgtactattaagaatggcttacaactcccattatatcttgccgattcataatgataaaccgaaatatcattgacaaaaatgttaataagggccccaattgatcaggacgcctatgcagataaacacaaggccgatgacaaaccaaatcagcgccagcggaatcatgaagcgaagccactttacgtacggaatgccgctggcagccagtacggccatcagaacgccggaagtcggattgacacagtttacgacgccttccccaagcatgaccgcttcaaccgcgacctgtctcgtgatgcccatcagatcggcaagcggcgccaaaatcggaataaatacgaccgcctcccctgagcccgatgatatcagaaaatgaagcagggcgctggaaatatacattccgattgcgcctgccatcgggctgaaaccgtgcagcagtgacgcaagtccattgactaccgtatcaagcagctttccgtgttccagaataacggaaatgcttctcgccattccgacgatcagcgcgccgtaaacgagcccctgacagcctgtaataaacgtttttgcgatatcatttgccgccattcccgcaatcaggcctgacacgattgagataaaaatgaacacggcggccatctctgaatcagaccagtcaagagtaagcgcgccgtataaaaagccggcaagcgacaaagccgcgacagccagaatcaatttatggcggacggtaaacgggactggcttgtcctccggatctgaagcctgcgggattgaacctgctgccggaaaccaatcgttccccagcagactggcgtcctttgcttttctgagccttctcgtataccgataaatatataaaatagatgatagcagaaaacaaatgtagacggcaatccgcaggccgatgccggaaaacagcggcagctccgcgatgctttgtgataacccgagcggtgaaggtgataaaatcgtcgcgttaaacccggcataacagccgatataaatgacggccgctccggccacggcatcccatttcagcgaacgggcgacgatcaggccgatcggaataaaaccgatcacggaattaacgacgatgccggttgtgccgaggatcgaaaatagagatccgacaattgcaataaacagcagctgtttggtgcggaacgtactgatgacattactgatcaatccattgatggcgcccgttttctccaaaatcgcaatggtgccgcccgtaaacaggattaaaaaaataatcggcgcggaacttgtcatcccttcctgaatcgcggtaaaaaaagcgatcgggctgacaggagactggtctaaagaatgataacttcccgggacggcggacgtcacactgccctttgtcaccctgtcaaattcccccgcaggaacgatgtatgatgctatcgcgcatagtaaagcgacaatgaacagcagcacataagcatcaggcatcacaaacaatttcttctttttcaatacaggttcggccttcggcacagccataacatcaccatcccgctttgaatttataaactattcagaaaatacagatatgtgctatattatatacagaccgattgcctgttttcaatatcaaaaataaaaaacagacagcttttgaaggaggacttacggcatgaacagactcacagagcatgaaaagcaagtcattatggacatttttgaccacctgcacgccaatcccgaagtaagctggaaagaatatcaaacaactgaatatctgactgaaaaactgaaagaggccggctgccgaatccgtacgtttgatgattgcaccggtgttgtcggcgaaatcggagaaggctcgcccgttgtggctgtccgggcggatattgacgcgctgtggcaggaagtggacggtgtctttcaggcgaaccattcatgcggacatgattcacatatgacgatggcgctcggcacgatgatgcttttaaagagtcagccgaagcttccgaagggcaccatccgctttatttttcagccggctgaagaaaaaggcggcggagcgctgaaaatgattgaaaaaggcgtactggatgatgttgacttcttatacggcgtgcacgtgcgccccgtacaggaaacggcaaacggccgatgcgcaccgtccattctgcatggctcaagccggcatatagaaggcctgattatcggagaagaagcccacggcgcgagaccgcatctcgggcttaacagtatcgaaatcgccgctcttctcgtccaaaaactcagcttcattcatcttgatcccggcatcccgcattccgtgaagatgacaaagcttcaggcaggcggagaaagttccaatatcattccgggaaaagcatcgttcagccttgatctccgcgcacaaaccaatgccgccatggagaaattaaccgccgaaaccgaaagagcctgtgaggcggcggctgccgcattcggcgcaaaaatcgaactgcaaaaagaacacagcctcccggcagccgagcgaaacaaggaggcggaagccatcatgacatctgcgatcagcagcattctcggagaagaacatgtggatgaacctcttgtgacaaccggaggagaggattttcacttttacgggttaaaggtgccgaacttgaaaacgacgatgctcggcctaggatgcggtctggagcctggacttcaccatccccaaatgacatttgaccgaagcgccatctttactggcgctgagatattaacggccgccgtcctcaaatcgtttgaagcataaaaaaaagcagcccgttacagggctgcttttcttcattacttcttcagatcttcaattgaattgacgtttttcatgtactgaggaacgaccagacccatcttgacgcctgtcagactcgttcctacatcttcatatttgcctttatatttagacgcatatgccttatgggtattcggaagccaagcagacaatgacgcatccgcgctgcctgtcgcaatcgcagtccacatcggtcctgcctccacttgcgtcagcttcacgtcatagccgaggtcttgaaatacttttccgattacattcgtacttgcgatttcactgtcccatgccacataagccaggttgattttatcccctttgactttatgggcgccttttgtccattgagccacttggtctttatgttttttcacatattcagctgcggctttggccggcttttcgccttcctcaacggcaatcatgacttctcccatatcgtcctgcgtccatttgaactggctgagaactttggccgcgttaggctgttccttactgaagccggttcttgtaatcgtatgaatctgctcggcagttccgtacgtttttttcggatcatcaaggaacttcagcttgtatctggagaacatccagtgcggcgtccagcccgttacgatgatcggctttttccggtcatatgatttcttcaatgtcgccgtcatggcggcacttgacgccgtgatgacattccagtctttcaatccgtaatccttcacggcctcatccgtcagggccatgatccccgatcccggatcgataccgataatggttttgttcacctggtccgcagccgttgccttatcatcagtctgcgaaccgcaggcagccaaagaaagagccagcgcagcggtaacgccgacaccgatgattttcttaagcatcaggcattccccctgctcttcttcttcactttaatgttttgcgtgatacggtcgagtgtaatcgctacgataacgatcgcgatacccgcttccactccgacaccggttttcaactgtgtcacggcgctgtatacttcagaaccgaggcccggcgcaccgaccatggccgcgataacgaccattgacaaagcaagcatgatgctttggttaataccggcaagaattgtttttgtggcaagcggaagctgcaccttgaacagacgctgagacgtcgttgaaccgaatgcttccgtcgcttcaatcagatcagccggaacctgtttaataccgagaactgtcatgcggatcgtcggaggcatcgcgaaaataacagatgccacaacgcctggcacaaccccgatattaaagaagaaaattgcaggcagcaggtatacgaaagccggcatggtctgcattaaatccagaatcggtgtgacaatgcggcggactgtttctttctgagacgcccatatgccgatcggaaccccgataataatggaaatcaaaacagatgtgacgacaagcgccaacgtttgcagcatcggcgaccaataacccaaataatcaataacaaggaatccgattaacgtaaagagtgcaattcctctcgtactgatccaccaagcgagagctgcaaaaataacagtcaataaaatagacgggatgaaacccaaaccgctcacaatcgcgtttacgaaagcggccaaaccgtttgagattccgtcaaagaaacctccgaacgtcatggtaagccagtcaacaaaccggtcaacgatatctgctaacggaattctaggcaatctgtccatttacttcaccccctgaacagaagaatcctgagcttgttcagcagaatcttcaacatttatataatcgttatttcctgaaagcgcgccgattaatgcgccttttacgacaatgcctttcatgcggtccttatcgtccgtgacggcgatcggaatattcgcatcagacacgacatcgaaaatttccgtcaagtatgtgctttcatgcacagtcgtaaattcagtatttaaaatatcctgaagcgataagtcggattccaccgcttttttcgcatccgccgcgtgaatgacgccgagaagctgtttctgtttatcaacggcgtaaatagaagaaataccgagattcttcatgagctgcagcgctacacgaggccctttgtcaatccgcacggtttcagcgcgcttcatgatgtggcccgctgtcagaactttggataagtcaacgtcctcaacgaatttctcaacgtattcattggacgggctcatcagaatttcttcaggcgtcccgatctgaacgatgttaccgtctttcatcagcacgattctgtcgccgatgcgcaatgcttcatcaagatcatgcgtgatgaagatgatcgtcttgccgacagagtcatgaaggtctaaaagctcatcctgcatgtctttgcggatcagcggatcaagcgcactgaaagcttcatccatcagaagaatgtcaggatcattcgtcaatgcgcgggcaagtccgacacgctgctgcattcctccgctgagctgatctgggaattggtgttcaaagccttcaagaccgacaagtttaagcgaatcaagcgctttttgctcacgctcttttttgtcgacgccttggagttccaacccgtattccgtattttcaagaatcgttctgtgcggaaacagcgcaaatttttgaaagaccatgctgatttttttccggcgcacttcccggagctggtcttttgacatatttgttatcatgtcaccatcaatataaatattcccggcagtcggttcaataagccggtttaacagccgaactaaagttgatttaccgctccccgatagacccatgatgacaaatatctccccatcatatacatcaaagtttgcttgattgacaccaacggttgatccggtcgctttcaggatctcttttttgttttttccgctggacagcatctgaatggctttttttgtctgttttccgaaaaccttagatacattttcgacttttatcttaattggtttctcatccaaattcatattttccctccataataagcaatctttaataccgtaacacgtttgtaataagtcaaacaaacatcataatcccgtttattttgtatcattactttaaaaacatccctgtgtcttattttcctctggtatgcttctaaatactctctaatcctccttattgaggataaattataaaggaaatcgggcttttatcaggcttgagaacgtttccatcgaatgtgctgcaaactgatttcctatcctttttttacaaatacaagaatttttttgcgacattgtcccggaaaaagaagttttcgcctcctgaaaataagggattttaaggaaaaatataggtctgccaacagacagctcactaaaaaaagcaccccaaaagggtgctcattgcgcaagctctgtctgtttcgtttcttttccgagaataataatggtgatgacggcaatcaggatggccgcacaaaagacagcgaaaatagctgtaaacgaaacgttccgtgctgcaagcgatccgacgagaagcggaccgaaaatgccgccgattctgccgacggccgcggttgttccggaaccggtcgcgcggatcgccgcagggtactgctccggtgtataggcgtaaagcacgccccatgcgccgagattgaaaaaggacagcagcatgccggccgtgagcagcatggccaatgaatccgcggcaccgaagaaataagcgctgcccgccgttccgagcaaatagatgactaagatggtcttccgccccgctttttcgatcagccacgccgctgagaaatatccgggaagctgggcaagcgtcatcagaaggacgtattcgaagctctcaatcatgctgtagcctttcatcagcatcacgctcggcagccataaaaacatgccgtaataagaaaagacgacgcagaaccaaacgacagacagcagcaccgtcggccggatatacggtttcgtccagacacttcccgcctgcccgcgtatgctttttttctgcgtcaatgcctgatgcgccggtgattccggaaggcttttccgcaagtacagcgcataaaacgcggccagcgccgttaagagcagtgcggcctgccagccgaatgacggtatgacaaagtaggaaatcaccgccgcaagaagccagcccgctgcccaaaagctctcaagcagcacgatgatccgtccccgcttttcgggagcggacgcttctgacacgagcgtcgaggcgacaggcagttccccgccaagccccattccgatcagaaaacgcaatatgagaaaaaccgtcaatcccgttgcaaaagcggatatgccgcttccgacagaaaagaataacagcgtgatcataaacacttttttccggccgatcctgtcggccagcattccgaataaaaaggcgcccgctgccataccgatggaattgacgcttccgatccatttcatttgatcgggtgttaaattccaatcagtgtgaagcgcggcgataataaacgataaaattccgacatccatcgcatcaaacagccagcccattccggcaatcgccagaagttttcgcggagtgacggcaggttgtttgttcataagcagcacctcaaatcgaaaatgattaccgtataagtttacacctgtctttacacattgtcattatcttttttcgcaaaaaaacccgcttgccgtaagcaagcggggtgcagattaattctttaagactgcgtttttaatattatcctgaagctgttgaatccgtttcgctccgtcttctctgatacgtctgttctcttcctcgatctgtttcgtttcctgcataccgctgacaatcgtattccaagacgtttcaatcgtctcaatgtcaatgctcggacggcctgccatacgggcaatctccacgctttggtttgaaatattttcagcgttgcgcttcagcatttcattcgtgcggcggtccagctcgctcattgaatcagccacaagcttttgccgtttgactgtgacagcctgaatgatgccgtttttgaaaatcggaatcgtaatgacgaaagcggaattgatttttccgatgagcttcgtatttccgcgctgaaggaggcggatctgcggcgctgtctgcagcgccaccatccgcgccatatctaaatcatagacacgttcctcaagcgcctgaagcccgtcacgcagcgtatcaagctgcatttgcgcaagctggtttccgccggccgctttttcttcataagaaggaatgagcgcctgcatttcctcaagcttcatctgcccggcgacaacatatttttcaagctccatgtagtagttaatgttgttttcatacatctcttcaagcgtatggttcgtctttgccatttcatctttgtattttgaaatttcgacgtggattttttcaatttctccgcccagggtgcggtacttttgaaaaatcttttcaatcatgctgttgccgcgtttgaacattttagcgagaaatccttttggttcatcgaaatcatttttgtcgaaacggtccatgatttttccgagctgcgtcagcattgtgcctgaatccgtgacacttgttgttttcatcatatttaagatgcggtcggagaacttcgagatttcaactgccggttcttttccgtactcaagcagctccatttggtttttcacgtcaatctgctgcgaaatgcgctgcacctcagggtcttggcgcagctgcgccctgatgtcatctgctttttgttcagaaatctcttcatttttatcaagaacaagcggattttgattttctgtcatatttatttactctccctgcttttgcgtaatggttctaaacagctttcttacgagtgacggctccttatattcctgccgaaacaccatgtcctccagccaatggacatcaaattggctttcttcaatataatgctcaatgtcctgatggcccggcggattatacaagatgatatcgacgccgaatttatttaaaaacaaaagagcggcggcatcagaacgtgtgagttcgccattttgttccgtatgatataaaacgagtttcggaacggtttgggcgtaatcaaacgtctgaatcaattgcagcagcgaagcgggcagattcgtcgcctggcggaacaaatagattgcggcatcccttgactgctccccgggcaaagccttcagccctgggtttctgcacatgtcagaaatcacattggcgatggcgctctgcacacctgaaggcagatgcttgtactgccagatgttgcttcttttcagcctgtccgcgtcaatctctcctttttcatttaaaacctgactgtagtgatactggtagttggctttcagctcttccgtaaacggaaaactgcggatcatgtgtgtctcctgatagtccgcggcggtatggagtctgttccaatattctttcgtatctttggaaacccccatcactttcgcaaaaaggttcggaacggccacccgctccctgtccgctttaaattgcggccggataaacgcccgctccttcgcaatgagaaataactcatcatacgtcgtttttaaggtcacggactgcggggtgtgctccctgaactgccaaggcttatacatcatggattcctcatggttcagcacatgctcaatttctttcgttgaccggtaggccgtcgtggacgttctgtccggcttttctttcggaaaaggctcaagaccgcctgttgcggggagctttatcacaaagctgagctcctcatccggatcaatcaagctgaacggatcttccgcagccggatgaaacaataggacatcacagccgatcagcatgagataatagagaaaatagagctggcttttggtcgcgtctccataccacaccaccttcggcatctcacactctatatcggcttgttcgagccatggattcaggtggttcagcgaaaactttgacacatccaagagcacacgccggaaatcgggatgattcagcccgttttcatgccggtccgcaaaggtttccaaaagcgtcataaacgcggtcctcagccggcggtgcataagcggatcagcgtgtttggcaagcagcctgcccccatcgagaaacgcgacaaacctggaaaccgaaagccctttctctttttgattgaccgaatgaatgtgctgcagcgcctgaaacgtttccggcgcgatggtcttatccagcgtctcgctcaacacatggatgttttcatgagaagacagctcgaaaagcttactgtaatactccgtctcatcataaggagtgcccaaaatccggccggcaagccgggtaaacgccagcccgttttcccgctcgtaaccgggacgttccggcagcggccgcatcagaaacgtttcccagtcatcgttttccggctcggcctttcggatcaccaattcttcctgcttcatcattttcctcctttctcttcatgataatcggtacaaaaaaggaaggaaatgaactctccctccttttttgttttattcttctttagatgcagccgtctgctcctgaacctgcttttgtttgttgaaatagtggataataaacgtgaccacaaatgcagcgatgatgattccgaagaacaccacgtgcggcatttcataatcaaaagcgctcgccgccattttcacggcgataatcccgatcagcacgaaagccgtgttttcaagctcagggattttatcaattaacacaaggaatacttttgcgactgtacgcatcatgagaatgccgagcataccgccgatcaagagcacccacactttttccgataccgcaaacgcggctaaaatgctgtcaacagagaaggccagatccattaactcaactgaaacgacagtggcccagaaaattccgaacgtacggaccatccatgaatttttcttcatgccttccgtatcgtcatcaccttctccgatccagaaatgcttaatgacgagccaagccaggtacagcgcgccaagcactttgatccaccagaacttaatgagcagcatcccgattccgataaagataaagcggaaaatatatgccccgaacaatccgtatgttaatgctttcttccgctgtttttcaggcagatgccttaccataaccgcaagcactaacgcattgtcggccgacagcagcccttccagcagaaccaaggaaccgatcagcccccatgatacagggtcagtcagcacctcaccccacattttccaatcaaaaaaggaagcgtaggtcgacataatatgatgtagaaaatccaagttttttcctcctatttagtaaaacggtaatttcctgcttacacctgcaagccgtaattccggcaaagtgatgccagaccgccggaaaacccgctgccgatggcgttaaacttccattcagccccatggcggtaaagctcacaaacgacaaccgccgtttcaatcgagaagtcttcccctaaatcgaaacgaagcagttcattctggctgttttcatcgacgacgcgcacgaacgcgttcgaaacttgtccgaaattttggccgcgcgcttccgcatcatgaatcgtgacggtgatgccgatcttttcaatatttgcgggtatttttgagaaatcgacgataatttgttcatcgtctccctctccctcgcccgtccggttgtctcccgtatggatgacgccgccgctcgggtgttccaggttattgtagaaaacaaaatcaagatcattaacacagttgtcatgggcatcgacaagaaaagccgacgcgtcaaggtcaaagtcatgccctccggagtacttgttcgtatcccagcctaagccgatcaccgcttttgtaagaccggggttcgtttttgtcagatcaacacgctgtcctttcgccaattgaatagccatgtgccgtctctcccttctgtgcttgatatggttttagccgatttgcaggccgtaatctgtcgcaatacgggccagtccgccttgatagcctgagccgatcgcggaaaatttccattcgccgttatgtctgtaaagctcccctgcgataatggctgtttcaattgagaaatcttcagccagatcgtagcggatcagctcttcatttgtctcttcattgacaatgcgaacgaacgcgttggaaacttgtccgaagttttggccgcgcgcttccgcttcatgaatcgtgatgacgaatgaaattttgtcaatagcggcaggcaccgcgctcaggttgacccttacactttcgtcatcgccctcgccctggcctgtaaggttgtcgcctgaatgtgcgacagagccgtttccgccttcaagctgattatagaaaataaaatcatcgggcgacgcgcatcttcctgcttcatttaatagaaagacgctggaatctaaatcaaaatcatgtccgccatcgtatttgtttgtatcccagccaaggccgacaacgactttagaaagacccggatttgttttagtcaaatctactttttgtccttttgccaatgaaattgccatgtgtgcactctcctttttatcgtttaggcgtatcggttaacgatatcgccgatttttgtatcgtttgtgccttctcctactgcggcgaatttccactcgccgtcctcgcggtagatttcagccgcgatcaggctcgttctgcctgaatagttatctcttaaattgtaagtcaccagttcttcgcgattagcctgatcaacgacgcggatgaacgcgttttgaatcatgccgaagtcctgttttcgtctgacgcagtcgtaaatattgacgacaaacacaagtttattaatctgagcgggcactttcgacaaatcgatgagaatttgttcatcatcaccgtcgccttcacccgtcaggttgtcacccgtatgtacgacaccgccgcaccggcttttcagattgccgaaatagatgacgtttttgctgtctgtcattttatcattttcaagcatcagtacggaagcgtcacagtcgatattggcaccgcctccgccgaacagctttccgaaaaagccgccggatgatacagggtcccagccgagtccgaccagcagttttgacaggccggcttttccttttgttaaatcaatccgctgtcctttttgtaaagagatcgccatatgattcactcctattctgtaagggtgccgctaagcacgccgcaagtgcgcatttttactaaattccgggacaagaatcccggtgtttattaagttatacgtcttttattatatcaaagtttcataaaacataagaatttttggcgaaaaacggcgaaaaattacttcctatattctccttcgttccggagagaatagagaaaacaaagaaattgacggggactgaacatttttcctatccttgtatcaatacatgtcaggaaaggggcagacgagtgattgatttaagcatacttgatcaggcgcccgtatccaaaggaaacgggccgcacgagacgctccgccgttcagcggagctcgcccgcctcagcgaaggatggggctataagcggtactggtttgccgagcatcacggcacaagagggctcgcaagcgtttcgccggaaattatgatcgctcataccgccgcagccacaacgtccatccgtgtcggatcaggcggcgtgctgctgccgcagtacagcccctataaagtcgcggaaactttccgtcagcttgaggcgctgcatccgaaccggattgaccttggggtcggacgctcaccgggcggcacgacgaaaatccggctcgccctcacagacggggtaaagaaaagtatgaccgagttcaacaggcagcttcaggatttatcatcctttctgacagattcggttccctcggaccatgcttatgccggaataaaaacagcgcctttgattgaaacagccccgcagctttgggtgctgggcctcggggaaaacagcgccagacgcgccgctcttcaaggtgcgggctatgtcttcggccatttcattaatccggaacgcggggtaaaagcctttcagatctatcgggaccatttccgggcctcctcccatttttccgctccggcctcactctgtgccattttcgtcatatgcgcagctacggatgagaaagcggaagaactcgccttaagccaggatttatggcttcttcgtgtcggaaaaggcgccgacagccgcgtgccgagtgtggaagaagcgaaggcttatccgtattcgccggaggaccgtaaacagattgcagaaaataggaagcggatggtgatcggctctgctgccgcagtgaaacgccgtctgcttgaactttccgaacgttatcagacaaaagagatgatggtgctgtgcaacgtctttgatttcgaagcaaaaaaagagtcatatgagcgtcttgctgatatatttctgtaaaaaaagccgtcaaacggcgcagcagatgagactgctgcaccgcttaacggcggttttttcgttcttttccttttttaaacgcattccaaatcccctgcagcataaagccgagcagaagcagaatgattaacagtaaagtgattgacggccccggaggcgttccgagctggtacgaagacgtcagccccatgaacacactgaaaagagaaataataatggccgccgcaaacacccatttaaaccctttggcgatacggattgcaaaagccgcgggcagtacgaggagcgcggaaacaagcagcacgccgataatcggaataatgaccgaaatcgccagccccgtcacgatgctgaatgacattgacaggagatttgtgttaatgcctgatgtcttcgccgtcgcctcgtcaaaggtaagcagatagagcggtctgtttaatataatgaaataaagcagaatcagcagggtaatgcctccgataatatagacctgctgctggctgaccgtgacaagcgatccaaataaatattgatcgatgctcatcgacgcgccgccttttgacaggctgatcagaaacatcgcaaacgacagcccggccgccattaagattgcgatggatacctctgaatatgtacggtatgcccgccgcatatattcgatgccgatcgctccgatcgtgacgacaacgatgctcgccgccgtaatattggtactgagaaaaaaaccgatggccacgcccgacaatgaaatatgagacagcgtatccgccatcagcgcctgtcttctcagcacgagatatacgcctaatatcggcgccataattccgatcatgcttcccgctagaaaagctcgtcgcatgaattccaagtcaaacatttccatccgcctttttcccccctctcaagccgtatgactttatccaaatactgctgtacttcattttgttcgtgtgtcaccatgacgacggtgcggttgtgatttttcacctgatgatgcataaattcgtagaaaccctgtctgctttcatagtcaaccgcggttgtcggttcatcaagcatcagcagatccggattgcttgcaagcattctcgcaatgcagattttctgcttctgtccgccggataaatcgccgattttccggtggcggaaatcccacatttccaccatcttcagcgcgttttccacctcgtggtgatccgtttcgttcaatcgtttaaaccattttcctttcgtataacggcctgattgcacaagctccagaactgtgcttgggaatcctgcgttaaatgaagaaatctgctgcggaacatagccgattgtcaggcgttttccggcagcgttttttttactgatctcggccgttccttcccaaggtctgagcatgccgagcatgactttcatcagcgtcgattttgacgcgccgttcggtcctgtaatgccgacgaattcgccgcttttgatttccagcgacacaccgtcaagcacgggtgtatgcgaataaccaaaaacgatatcctgtaatgtaacgagattcatgctgaccttcctttcccgcatagaaatagtgtgcaccccgcggcgcacactatgttatttaaccaatagcgaatctttcagtgcatcaaggtttttctccataatgtcgatataaccgatgcctttatcccgttctttttggcttaaaccttccagtgtattgagcacttccgttttcgcgccgatttcaccggcaagtgtatctgcaactttaggcgatgcaacttcttcaaaatagatgatcttcacatcatgctttttggcaaacgttttgagatccgccagtttggccgcactcggctcttcttcaggagaaaggcctgcaatcgcgacttgttttaagccgtattctttggcgagatagctgaatgccgcgtgctgtgtgatcaattcttttttcgacgctttatttaatgttgtacggtatagtttatcaagatcctgcagttttgcaatatattctttactatttttctcatagtatgctttattcttcgggtcctgttttacgatctgcgccgtaatggttttgacctctttttgcgcaagaaccgggctgagccacacgtgagggtccatgctgtggctgtggtcatgaccgccgtgtccatgttcctcttcctcttcatccgaaccttcgagcaagtcaattcctttcgacgcctttacaaacttcgcatgatcagagctcatgcttttttccgctgaaggaacccatgtctccatatattcgctgttgtatacgaaaagatcggcgttttgaatgccggcgatatccttcggcgtcggctcccaatcatggggttcgaccgaagacgggatgagaatgtctacatcgcctttgtctttgacaatttgtttcgtgaattcgtacataggataaaaggtcgtcacgacgtgcagtttgccgcttttcgaagaacctgacgaaccttttgaagatgaattgccgcagcccgccgcgattaaaaagcatgccgcaatgacaatgattccgctccattttttaaacaagccgtttccccctgttctgtaaatcagaatgatgacgatttccaaagcgtactttctcgttcatttgttacctataccataataaaacgaagtaattacgttttgcaagtaatttttttctaaattgataaccgatttacctaaaaagcccccgccatgtatggacggggcgtcgtatcacatatcaggcatgcagataaactcttgtttcgtaagggcggaacgtgatgcgggattccgctccgccgttattttcatagttgctgagaagcagctcggccctttcagattcggagccgtccggccaataaaaggcggcttcttctttcgatacgttgctgatggatatgattttttgtccgtttgcctgtctttcatacacaaacagctgcgggtcatcgggaaacagcagcgtgtagctgccttttatgatatcagcatactgttttcgcaggcggatcagttttttgtaaaagttcaatatagaattgggatcatcctgagcctcggccgcattgacggttttgtaattgggattgaccttcagccacggttcgccctccgtaaatccggcattcttgctgccgtcccactgcatcggtgtacgggcatgatcgcggcttttcgccataatggacgccatgacttcttccctgttgcggcccatttcaaatacccttttgtgatacatattgacggtctgaatatcttgatagtcctctattctgtcaaacggggcgtttgtcatgccgagttcttctccctgataaatgtacggcgtgcctttcatgaaataaagcagggcggcaagcattttggcggatgcctttcggtatttgccttcgtctccgaagcgggatacgatccggggctggtcatgattgcaccaatacagcgtattccagccttgatgttccagtttttcctgccagtctgtgagcactttcttcaaatcggacagctcaagcggttttacatcccaatgctcttggcccggcttttgatcaagctccatatgctgaaaatgaaaaatcatattcagttcatgctcatcggttcccgtgtaaaccagcccctcctcaggcgtcactgatccggcctcgccgaccgacatcacgtcatattttggaaaatacctctttcgtcatttcttttaagtaatcatgtatccgtgctccgtttggccggaaaggcttcggatctgcccggcgggcgatgtaatcttcatatggcggcaagtattctttttttgacagaagatgaagctggtctattcgcaatccgtccacgcctttatcgagccaaaatctcatcatctcgtatactgattgccgaacctcgggattttcccaattcagatcggcttgtttaacggcgttcatatgcaggtaatattcgcccgtatgttcttcgtactgccagacggattgtccgtaatccgacacccaatcggtcggcgggccctccgcggtgcccggccgccaaatataataatcgcggtatttgctgtccggattcatttccgcctctttgaaccaaggatgctccgtggaggtatgatttaaaacgaagtccatcacaagctttaatccgcggctgcggcattctgtaagcagatcgtgaaagtcctccatcgttccgtatgattccataatcgcttgatgatccgtcacatcgtagccgttatcgacgtttggcgacgggtaaatcgggcagatccatatcacatcggcgccaagctcttttatataatcgagacgcgcgataatcccccgcaggtcgcctatgccgtcgctgttcgtatcttggaagcttcgcggatagatttgatagacaacggcgtctttccaccagtcattcgccatcttgcggccctcctgttttttagagaaccatttcctgtatgccccttctctaaacaaaaaagagaaggtttcccctcctcttttatctttccagctgggacggataaagcgtcatgcctccgtctacgaaaagtgtcgttccggttacgtaactcgcttcttccgacaccatccatgcggcggccgcggcgacttcttccggttttccgaaggcgttcatcggaatttttttcagctgggcctgtttatgtgtttcatcttccagatccttattggactccgtggcgatcgtgccgggagcgatggcattcacccggatgcctttgtctgcgtaattgagcgccatcgtttccgtcatcattttgatcccgcctttggatgccgagtactgcacgttttcaggacgcggtatttgctgatgaacgctcgatatgtttaagaccgttccttttttgccgtgctcgagcatatgtttcagtgccgctttcgcccccaaaaaggtgccggtcacgttgacgtcgatgaccctttgccaatcctccaggctcatttcatggggcatcgcttccgctccgttaaagccggaattgttgaccatcacgtccacgcccccgaaatgctcctgcgcggcattaaacagcgcctgaatcccttcttctgaggatacatcggcttttacggtgacggctctgcctcccgctttctcaatgatatccgccgcttcttccgctccggcggaatcaccgaggtagttcacaaccacattcatccgctccttgccgaagcgttcggcaatggcttttccgattcctttcgaagaacctgttacaatcgctgttttcccctgtaaatcctgatacattgtctcatttcctccctgatgttaatacagagcatgtacccggttttaatcggctgaaaacaaaaggaatcataaaaagaacgatgaaaccgaagctccctcgttcttttttttattatgcgtagttgttcatttgcagccttttttgcacgccgacaagcctgctgaaaaaataagatgccgctttgtagttctcccgtttatgaaagaaatgagccgcgtcctgaagcagttcctctgtgtcagccaacagctcctttgattccaggatgtcaaaatactctttgagcgaatcctgtccgccttcccctgataaagctctttaatcagacggaatttcgtcatatagatctcatcttcccactccgccgcgcttctcatgccccgcgcgcagctggcggcggcttcactgtatttttccgttttaaagtagatatgcgtgagtgaaaaaacagcctggatgacctgccggaagctgtgtgcttcaaatccggcagccgcccgttcaaaatcctccgccgccttgcaaaagtcacccagactgtacatacagtgcccgatattataataggccgcagcaatcatatattgatcatcaagccgctccgcgtgctccaaggcgcattcgaggtattccagcgcttttttatgctgctgggcgtccatcagatttccggcaatgataaatttgcactgcacccttctcattccgtataattcatatttcttgtaaatatcaagcgcctgccccgcgtaattcatcgaaaagaaagtctgcttgatatgatagtacacctcagaaattttatacagaaactcggctttctctatgtcatcttccacatattcaagcttttcctcagcccgcttataatgagaaatcgctgagatgaagtttttctgcttaaattcatacattcctctgaaatagtaaaaataatattccagtaagccggtcagcttttgctggttcatctcaatctcagtgagcatttcagagaacggaggctggcagtcgccgtctttcatgggttttaatttatccagcatgatgcggtgcctaaattccatcaatgaaaaatacaacaataaatcctgattttcttccatatcttcgagttcatattgaatctcccgcttcagcgcttcagctttatcggcttcaaacgcgcggatcagcttataccattcattcatctttacggccacttcttcagatggaatcttggatttcatagatttgcctccttcctccggctactaattatgttatattttatcatagcaaatttatggcagtgagcaaacaaagattttaatcaattaaagaaagagagaattcaccatgaaactaccagtcagaatttcgctgcttctgatcctcttcttttccgcagacctatgtttttcctatgtgcagaaagaattgaggccgcagacggcattacaagatagagccattccaagcgctcttcatccgctcgtgaaacagaatgcggagctattgcggacggccgctctgaaaaaaggcatcaccgtcgttatcacagagggtttcagatcaattgaggaacaaaacgaattgtaccgtcaaggacgttcaaaaaaaggaaatatcgtcacctacgcaaaaggcggggaatcttaccacaattacggccttgcgatcgacttcgccctgcaaaaaaaggatggaagcctgatttgggatatgacgtacgacggaaaccgaaacggcacgcccgattggcttgaggtcgtatcgattgccaaaacgctcggttttgattggggaggcgattggagaggctttaaagattatcctcatttacaaatgatccctggctaataaaaccttttcttttttcgcttctgcgcatcaatgtacggaggatagacaggcctgtacacaagcttatatccttcattgccggacggcgtaaaatcgcgctgccactccagccgcagatggaaatcggataaaaaagcggcctttgcttcttcgggagtaacggccggcaccggattgatcttctccagctgctccgggtcaatgtcaggcgccatataagcttccacaagccccgttacgggactgacaagtattctcgcagcgccgaaccgcagcggaatatcctgatgccatacggaaaaatggaagcggaacctgccccttccgtccgttttcagcgggttcattttaaaaaactcgtccgctctcggataaagcttgtataaaaattgaagcgcgacggcctcacactcttccgcagaataaaaggccgggccctgatgctcaataaaagatttaaaggctgtcattttccctgtctttttgtccgttttcatcttcattgtatttttgttgctggtttcaaaatagctttcgatactcaaatctttccgttccggaaccgaccctttccgccatgtcgttccgatctcatccccgagatcgcgccggcgcgtctgaaccatatccgaggtaaaccccatcaattcatccaggctgatttcccgtttatgttcaaacgcaggaagcggttttgccggctcattcctgtcttcgcaaagctgctgatccggcacgatatcatcttcaccggccggatagctgtaagccggcagaatcggttcatagacgagacgcggtatgttctcaaaattgaccacatcatagacgagactgaatgtcagcacactcatataatgcgagacgactttttcccgatcgacgaatgtttccgggacgggcgcttcacccttatccccgtaatagataaactgcacgacgaagccgctcctggttacatcaacgaaaaaacctgaatcgggaagcggccggccgagcactttttttgtatagataaatcggatgcacccattgcgttcttccctcgcctgaaagatgaaattcataaaagtaagcgggcggtgtctcgccgcaaaccgaagagccgtcagctttaattcggcgtctgacagctgcatgtctgaacccggacagtcgttgcgtgaataggtaagcaaagatccgtcgtcgcccagctcaatcgttaccgttttatccggatggttacgatctttccatatataataggctctcgttttttgtttttcatcataatcttctatttcaagctcatagtgcggcggtatgttcccgatctccagcgctttttttctcagatgttctttcagcaatggggtcatcctttcagaagagtgtataaaaaagaactgtttttaattatataaaaacgtccttatccttttaaagggaagaaagtgccttttatgtgtctatttttagcaaagagggaaaagagccgtattcagagcggctgtttttcatacaatagtcacaattcccgcaaaagacccgggacgaacgcccatgaccttcagcctattaaactcgtgatcacttctcccgtatgggcctcaataaaccgcgggaaaaccggcttgtatacgagcctgtacacttttccgcagctgccgtcatcgtaacaacgatcccaagcgagctcggctttgatggcccggcggatcgcgtccttcgcctcttccattgtcaatgaaggaacgggatcgatttcctccagctctttcggatcaatttccggcggcatataaaacgtgacaagacccgtctttttgctgacgcagattctcccctctccgaatcgcaaatcaacgccgcccgaacaagccttatatgtaagtcccacgttttctccttcatcatccggctcatcatattgaacccggaaatactgatccgcttccggaaacatggcgaataaaaagcggatggccatgtgatggcattcttcctcggaaaactccggttcgccttcactatgtataaatgacatcactccggcgagccggcccgattctttatcatgcattgttttcaatacatgttcattccgttctttaaacagactttctaagcttttatctttccggacggattttgttttttcaggacgccatgcaatgccgatgcggccgtctccaagatcagtttccctctctttataaaaaccgtcgtgcagcccgatcatgtcattgatgctcatcttttccgcttcaggtgcagggcgtgaaatcgggacatacggcagcatgtcgtcttccagcccttcatattcgtctatttctgcattctcttccttcaggtcagccgatatcggccgcgtcggagacacgatttcatagacgagatgaggcttgtcatccccctgcacatagacggactgatgcagtacggtgaacaacagctccgcttcaatatgtttgacaaagtgagccaatgcttcccgcttgtccgcaattgttccgggtcttaagagattatcagccttcccatggtaagaaaagccggttacttcccctgtcaaagacaggtcggcgtaaaacccggtcagcggaagcggcagaccgtcagccatctgaacataggaatatctcacatcaccatcatttgcggagccgctgttttccaattcgaactcagccaatgcccccggacgatgggtttctacaaacgcccgcatccgttcttctatgtccgattccgaaagagccggcagatcagtccggaaagccggacgggataaggatttcagttttccgtcccggtccaattcgaccatgatgccggcttccggatcattcttatcttcccaccaaaacaaaacctcatcttcttggtattcttccacattactttcgtagcgggcaggtacgttaccgatccggagagccagctgtttcaattcttcttttttcatcataacacttccttttcttccaaaaagattgatgattaccaagactcttttatacaaaactagtataattaacctgtctgtcttcatgactattgaattaatcattataacaacagggggtaaaccagatgtccatcaaaaaaatgagcgccgtgtttttcatactgcttctcacggcatttaccgccgcatgcagcagcgaaacgagcggcggccaggaaagcagcacggcgaaagtgaaaataaaagagacggcatgggccgcttcagacgatactgaacatccggccgcgctgaaagtaacggtcaccgtcaaaaatacgggcaaagacccgcttaccgtcaaaagcagcgacttctcgctttatcaggatgacgcgaaaacagcggcggccgataaggatgaccagatgcagagcggcacgcttcatgcgggcaagacagtgacgggcaatctgtacttcacggctgacgaaggcaaatcatatgaattggtatatcagccgcaggcaaaagacgcgaagcctttatcttataaactgaaagtcaaaggcacagcctcaaacgcaaaacctgacccggcggacgcattatccgcatacattgatgtgatgctgtacggcaagcacaataaagatttcacccgcctgaccggtgtaaatgaaaaaatgacggccgccgcatatcaggaatcggcgaaagccagctttatcgcttctgcaggcatttcacaagaacaggcggattcaaaagccatttccgctattattgacgccatgtcatcagcgcttcgggataacacagagctcaaggtgcataccaaatccatgtcaggcaaaaaagccgtccttgaagcaaaagtgacgccgcttgatatgtctccgctcgcgggccagctgcaagaccgcgtgcaagactatgccggaaagcaccccgatgctgatgaaaacgaaattgtcagccacctgctttctgtctatccggaagagtttatgcgcctgaaaccggcttcttcttccgtaacaagagaaatcgagatgaagaaaaacgcccgcggccagtggtatctggatacagacgccgatctggaaggattgacagaagcgtttttgaaaacgtcctgacagcaagaaaggaaatagcgcaggctatttcctttttttattttcacttgaagatgtcactgatatattgaacctcatcctcggtcaattgcacatcaagcgcgcccagattgtgtttcagctggccggggcgtttggctccgggaatgatcgcatccaccgccggctgcgacagaagccacgcgagtgcgatatgcgctgtctgcgcccctttttcttccgcaacggcccgaagcttatccactcgctccaggttttggtgaaaagcttctccctgaaacggcggcctgttttttcggctgtcctcaaagactgtgtcttttgtaaactttcccgtcagcaagccggaagcaagcggaaaataaggaataaaagaaataccgttcttttcacaataaggcagcagatcatgctccgcctcacgctgaatcagtgaatattctgattgaaaaacctctaaataaccgtcggcgttaaactcctgcaattgcccgaagctgagattggacgcgccgattgctctgattttcccttcgtccttcagttcttttagcgtgcccgccacttcggagagcggtgttttgccgtcagggaagtggacgtaatacaaatcaatcacgtctgttttcagccgcttcaggctgttttccgcctcactacggagaaattcacggctgttgtccagctcgatttgtccgttgacctctttgtgcgcgccttttgacgcaatcacgaggctgtcccgcacgccgcgctctgcgacaacttcaccgattaactcttcggaacgccccaaaccgtatataaacgccgtatcaataaaattgacgccgccgtccaacgctgtgcggatgagttcttttcccgtttcatcattaagattcggaaacagattatgtcctccgaccgcattagcgccaaagccgatacgctttacccgtaaatccgtcctgcccagcgtacgtgtctcatccatggctcaggctcccttccttttatcgctctgtttagtattagataactggtaagaattatcctgccccgagagcatttctgcagaaaaaaccttgaaaagcatgtgcccttcaaggttttttggctgtgtattaagatgtcagagctgcggcgaagcgttcggcttcatctgtgagagcaccttcgatttccttatagcggctggaaatcgttgaggcgctgacgccgtacttcttcgccagcttggcttgagaaacggacgcgccgttcagagaaatactgtttacgtaatattcaaccgccgccgcgaaagcttccggctttctgatcgtcggtgtttttttgacacagaacgttttccacaggtcaataacggccggaaccagctcagccgggtattcatccccgctcaggcctttttcaatggcgtccgccgtttccttctccatgtcgttcgcccactccgtctgtttttcttcagcagcctgctcaggctcttccgccgttcctaaaagagcggccagcacagtgtcgaagtcctcctgcataaagcgctcaggcgattttccttccgcaagggccggggcagccgcctttttcactttgctgattagagcttcggtccgcttcacagggaagatcgtaaactgcataaagaactccgctttttccgcttcgtggatcggatagccgagaatcaggcttcccgccggcggaagatcctgctggctgacgtccatttccactttgaattgtttcttggtcatcacatcttcaaagtgaatcattccttctttcacatcttcaagcaccataaccgctggtgtcatgcttttccatgattcaacgatttcccgtgttttcggacggttgatgccgccggcttttttctgaagatattcttcaaaaatcgtcttgccgcctgccagcggacggaagaaaattccccagataccgaggttgaagactccgatgtctttagtctgtctgtccagctccgtaatgaactcatgctggttaataaatgatgatatgccgtctctatgtgctgtaaaggcgtactccattaagctttcctgaatctgtttcgcttcttttgccgcgatgtctgccggaatggcagcttctttgcttccgcagcattttttatatttcttcccgctgccgcatgggcaaggggcatttcttttcacttttcccacaataaaccctccgaattctgatataactttattattttaacaaaaataacttcagagggcttggtttacggcgaaaaaagaatatggaagaaaaaaaggccccgggatattctcattctccggggctttgaaactgttaatttgtattttgtccgccgccgttcagaccttctttaatcagcccgtttacttggctgttcatcaaaagtccgatgtgtccgacaccgtgaatctgcacgtttttcccgccgatcagtcgtgacagcgggttcagaacgatcaagtccgctgagctgtaaatcgatgtatataaaatcttttggttcggatcagtccccggaagcgcccggttggtcacaaggccgttcgctccgccgagtgtgacgacgttggcgattttgtctccgccgtcaagatttttaatgtaatagagcgtgttggcgccgcccatgctgtgcgcgacgatatcgacttttttcgcacctgtttcgctgagcacttttttcacgtaattggacagtctcggcgcattgtgtctgttgtttccggttttgtctaagaaatcaatagcgtacatctcttttcttgaccagccttgggatgccaagtatgttttgattcccgcaaagttaaaagacgccccgccgattccgtgaaccatgactacagggttatgccctgaggaggctttcgatacggtcggctggaaggcaaatacggaaatgacggacagcatacaaactgtaaggatgactaggattttgctttttatatgtttcatgaactttcctcctgctatgtaatatttttgcagttttcattctattagagaagaaaaggaaaaaatagtgtattttttactgttttcaacaattaaaaaagagcggaaaaatgagaaagacgcccctttcccgaaagcacgcttatgctttaatacggcataccgacaaaggagagaacacccggttctctactcctagtactcattgaaataggtttgaatccgcttaggatcttgcgtttttgtcagcgcgagcatgagaagaatccgcgctttttgagggttgagagagtttgaagctgtcaaatggtctttttcatactctcgattaggtgttaccgccccgtttcccgtccttgtggagcggacgaccgccagcccgcttttgaccgactttacagcgccttttagcgccgcatcagacattgagccgtttcccgggcctgcaaaaataatgccttgcgcccctgattttacggcggcttcaaagagatagcttccgtcattttgatagccgtatataatatcgacctgcggcagtttatcaagtttatctatcttgaaatctgtatccttcgtatgctttcgggtgatgatgttattaaaatagacgtcatcagcaattgttccgatataacccatttcttccgatttgaaagtgtcggtcgcggttgtattggtttttgtcacataacgcgccgaagcgattctgtcatttaatacgacaagcgtccccttgcctttcgcctcaggcgcagccgctgtttttaccgcgttatataagttggacggcccgtccgctccgatcgccgtggacggccgcattgacccggcgacaacaacgggtttgtcactcttgaccgtcagattgagaaagtaggcggtttcctcaagtgtgtctgttccatgtgtaatgacaatgccgtctgtatcatcagacttgagcagcttgtttacccgttttgcaagtttcagcagtgtctcgttattcatattctggctgccgatattcacaacctgttctccgctcacatgcgcggcctcttttatctccggaacggcctgaatcagggcatcaactccgattgcccccgccctgtactccgtagcggacgtctttgaaggagcagcgcctgcaattgtgccgccggtggcaagaattttaatattcggaagtccgtcttttttcgcagaggctgcggctgccatctggggcggtgtttctttcgtttgaggagattgggagcagccggccgcgatgaagagcagagccgtgataaatgtaatgaagggcatgaattgttttttcattcttttctctccttttctttatttatgatgattttcctctcaccggtcaacgcgcttgtcaggcattcttccgaagaaaataaccgttaaaaaaccttgacaccgtcatgcgaaatcaagataatagaccagtcactatattttaaatttgtcacaaatcagtaaggtgggaacattatgagctatggagattctcgggaaaaaatcctcgccgcggcaaccaggctgtttcagcttcaggggtattacggcacgggactgaatcagattattaaagaaagcggggcgccgaaaggttctctttactatcattttccggacggcaaagagcagctcgccattgaggctgtcaatgaaatgagccattatatccgtatgaaaataaaagaaagccttgatgctcatcttgatccggcggaaagcattcaagcgtttttacaggacttatcaagccaattcacatgtccggagaattttgaagggtttcctgtcggtttactggctgccgagactgctttaaagagcgaaaagctccggcaggcctgtcaaaacgcttatcaggaatgggagaatctgttcgcgggcaaattaagatcagccggtttttctgatgagaaagcggcggaaatcagcactgttttaaatgccatgatagaaggcggcatcattgtgtccttagccaaaaaagacaaaatgccgatcctccatatttctaaacaaatccccaacctgctgaagacataaaatacgagagacatgtacgtatagaaagagaggagaatgattttggaaaacgctcagccttccaaacaatataaagtcatgccgatcatgatttctttgctgacggcagggtttatcggcatgttcagtgaaacggcgctgaatatcgccttgactgatctgatgaaggagctacatatcactcctgcgaccgtccagtggctgacgacgggctatctgctcgttctcggtattcttgtgccggtatcgggtctgcttttgcaatggtttacgacgagacagctgttcatcgtttcactcgctttttccattatcggcacgctgattgcagcgcttgcgccgagctttccgtttcttttggcggcaagaatcgtgcaggctttaggaaccgggctgctgctgccgctgatgtttaatacaatcctcgtcatcttcccgccgcataagcgcggagcggcgatggggacgatcgggcttgtcattatgttcgctcctgcgatcggtccgacattttcagggcttgtgctagagcatttgaactggcattggattttctggatttccctgccgtttcttgtgttggctcttttattcggcatcgcctacatgcagaacgtgtctgacattacaaaaccgaaaattgacgtgctttccattattctgtctacgatcgggttcggcggcatcgtattcggattcagcaatgcaggcgaaggatcagacggctggtcaagcccgacggttatcggttcgctcactgtcggcgcgatcgcgctcatcttattttccatcaggcagctgacaatgaagcagccgatgatgaatctgcgcgctttccgctatccgatgtttgttctcggtgtcgtgattgtgtttatctgtatgatggttatcttatcgacaatgctcctattgcctatgtatttacaaagcggactgatgctgacggcgtttacgtccgggctcatcctgctgccgggcggtattttaaacggctttatgtctccggtgacggggcgtctgtttgataaatacgggccgaagtggcttgtcattcccgggtttgtcatcacggcaactgtgctttcgtttttctcaaacattaacggcgcttctacggcgcttctgattgtcgcgcttcatacatgcctgatgatcggcatttccatgatcatgatgccggcgcaaacgaacggcttaaatcagctgccgccggaattttacccggacggaacagccattatgaatacgctccagcagatggccggcgcaatcggcactgcggtggcggtcagcatcatggctgccggccagaagaattatatgagcaccgcgaaaaacccgaatgatccttccgcatactctcacgcgctgattgcgggcgtccagcacgcctttatctttgcgatgattgtcgccgttatcggcttgatcagcgctttctttatgaaacgggtcaaagtgaatcattcataagaaaacagcagactccccgtgagtctgctgtttttttatataccgcgcgcttcagccagttcatcaatcgcatagatcagatcgtcagctgtgttatagaaatgaggcgccagccggatgatttgtccgctggatgcgcatacgatgtttttccgcctcaacagcgcagccgtttccgccgctttttcatcccgtatggaaatcatgccgggtctgtcatcggcagacggcggccctgtgagattcagtcctttttcagaagcgtattcatacgcaaatgcgctgagtttttttacttcttggtgaatgcggtctgtgccggcatcgtttaatagagataaagccgcctgtgccgcatatatgctgataaatgccggggttccggtctcaaagcgtttggctccgtccgcataagaaaaacgggttaaatccggcatcgacgcccgctgctgcccgaaccatccggtgactttcggcttcagccgttcggcaagttcctttctgacataaagaaacgccgttcccggtatgccgagcatatactttctcgcacccgcggccagcatatcaactccccattcttttacatcaatcgggatgtgccccgccgattgataagcatcgacaaaaagaagcgatcccttctttgcggatatctcggcaatgcgctttatatcctggacaaaacccgacgtatatgacacatggggcacacaggtgaaaagcgtctgctccgatatgtacgtctcataccgctctaacgggatcattccatcttcagacggcacgactgaaagctccatctcagtctgtgccttcaaaatgtgggcgatcgccggaaaatccaattccgtatacaccgcctgtttctttcggcaatccggtaaagcagaaacgacggcagagacagcagccgttactgaaggtaaaacggcgatttcttcaggatgggcgccgatcaattttgcaaattcacaccttgcctgctccgtacgtccaatggcttcttcccagtttccgccatgctgaaacaggctttcctgatagtcattgaccgcttttgaaaccggcagggcaagagcgctttgagagcagctggcgagcatcgtatgtgtgcggagcaccggaaataaagatcggtattgcaccagaggcgaattcaagacatggttcccccttcggcaggaatatatgtccattatagagtatggtaaaaagaaaaggagggttttatatggagaaaaaagtattactgacaggctttgaccccttcggcggggaaacggtcaatccttcatgggaagcggtcaaacggctggacggttcccatgaaggccctgcctctatcgtatccgaacaagtgccgaccgttttttataagtctcttgccgtgctgcgcgaagcggtcaaaaagcatcagcctgacattatcatttgtgtcggacaggcaggcggcagaatgcagatcacgccggaacgggtcgcgatcaatctgaatgaggcgcgcataccggataacgaaggaaaccagcctgtcggggaaaacatttctcaaagcggtcccgcggcctattggaccggccttccgatcaaacggatcgttgaggaaatcaaaaaggaaggcattcccgcggctgtatcctacacggcggggacgtttgtatgcaatcatctcttttacgggctgatggatgaaatcgcctgccatcatccgcacatccgcggcgggtttatacacatcccgtacattccggagcaaaccttgcagaagtctgcgccgagcctcagcctggatctcgtgacaaaagcgctcaaaatcgccgcggtgaccgccgcggcgcatgaggacgatattgagaccggcggaggcgagcttcactaagcggcagacacctcggcccatttcttccggtaaacgatgcgggacagcgtcacactgatttcatagaggacgagcagcggaatcatgacgagaaagtcagacataaaatccggaggcgtaatcagcaccgagacgacgatcagcaaaaaatacgaaagcttccgcgcctttgccagccgggttggattcacgattccgagccgtgtcagaaacatgacggccagaggcatttcaaacaaaaatccgaacggcaatgtaagattcagcataaaggtaaaatacttgtccgccgtaaataccatgtcaaaatggccggcggataattgtgttaaaaatccgagcacaatcggaaacagcacaaaatacccgaaggaaattccgataataaacaaaagcgaaagccccggaatgtaaagcaaagcggcgcggcgttcgaacggggtcaaagccggcgccgtaaaacgccagagctgaaaggccgcaaccggaatcgctgccgtaagggcgcatattcccgcaatcatcatatacacccataaaatctcgctcggccctaaaacggccagcctgccatgcaaatccttgatcagccagtcataaatatcctgcacaaaccagcaggcgccgataaaaaacacgagaaaggcgataacgattttaatgagacgctgccggacttcctctaaatgcccgatcaagtgggtttcttttttatccaatcgtacatcctccttatagagaaagaggcagaagcggattcgtctgcccccatgtcaggattcagcctgccgttttgtctttctcagccgtctgcttgtccggctcttcatttgagaccaatgtttttgcggcgcttttaaattcaagcagcgtgcggccggcggcacggccgatttccggaagttttgaaggtccgaaaatgatgagagcgatgacgaaaatcaggatcaacccgggaatgccgatatttgaaaacatgagtgtgcctccttattgtgagattttggcccgtttctttctcatttgcttttcatgcgcattgttatgggcgaagaaacgatcctcttccacctcgtttgactgctttaaaccgcctgcaaccgccgcttgagagaccttccgaatccccgtctggtctttctgataaatgaatgaagcccgcgtggatacctcagcccccggctccgtcacgtacggcaccactctgtaatccgctctccattgggcaggagtcaccgtacagcggacatagccgcggtaatcgttgaaaaacttaatatgcgggttttgttttaagatctgatccgtatcggcccgtttatccgccccgtttcctccagatgtaatggaagtcccgacgaattcggctccgaaaatttttgaattcgtttgattaaaatcggtatgcaggtttgacgcccagcttgcatgaacatcacccgtcagcacgatgacattgttcaggtttttgctttttataaaattgatgacccgctcccgctgagccgggtagccgtcccatgaatccatgctgtatatcggattggcggttgttccgaaattccattgcgcgaaaaagatttgctgcgccagcacattccacttcgcttttgaggcggctaaatttccgaagagccattgctcctgctctgtccccatcaatgtgcgcttcgggtctctccactcatcagaaggcggcttattcccgtcgccgttggcctgatcatctctgtactgtcttgtatcaagcacattgaacgatgctaaattgccataagaaaattgcctgtacagccgcatatcaggaccgttcggcaatgacatgcgcctgagcggcatgtgttcataataagcctgataagctgcggccctcctgagcacaaacgcttcaacggattggcctttttcagggataacattggcataattgttttccacctcatgatcgtcccacgtcacgacccacggaaatgcggcgtgggcggctttcagattggcatcagagcggtattgggcgtgacggttgcggtaatctgacagtgtgtacacttcggcgctgctgtgcgtcctgacatttcccgtttttgacacatattcgttcggtccgtattcataaatgtaatctccgagatggaatacgagatcaagcttttccttcgccatatgtttatacgccgtataatagccgtgttcatactgctggcatgaggcaaatgcaaacgtcatggccgatacgtcagcgccgggagcgggcagcgttttcgtccggccgacggggctgagctcatgcccgcttttaaaccggtaatagtacactttattgggcttgagcccgtccgcctcgacatggacggagtgtccgagattcggcttggccatttccgttccgcgtttgacgatgtgacggaaatgttcatctgcggcgatttcccattttaccggcacggcctgcttcggcatgccgcccccattcagcgggtcaggggcaagacgcgtccagagaatgacgctgtcagacagcgggtcgccggaagctacgccgagggtgaacggatagtttgaaaatttcggagcggcattcacttcaaacgcgccgatggattgcgcgatcgctaacccgagggaaagaccggcgattttcccggcgccctgtataaatgcgcggcggtcaaacgtattgttctgaaagcttttgttctccaattccttgatccattcatctaaacggccgtcatgtgtcatgtcagttcccctttcgtcttattgatcgcccttattataaaaaagaaatgttaaaccgctatgaagaagtgtgaagggtttgtaaggctgaaaaatgaacggcgggagacatttttcacattgtttcgacaaaccttgccccgccggaagaaaaccccctctgtttctttttggcttgtcatccgtcaagcgcacttttttcctatttttcttcacaaaacattaaaaaaacaccgttcattttaagaacggtgcccccgggattaaaatgtattgtacacgttttcgcacgtctcacctgtcggctgatagaagcagtgggatctgaatctggcgacaaacggctggccataccaagtctgcgggcagttgcccggcggcttaaagtaccacagactgaacttagccggccaaaaccgttctccgttaatgttcctgcgggcaagcctccgctcggattcacgcggtctctggtaaaagtatccgtgagtcaccgcttcaaacgcgtgcggctgaaacaccatctgcctgatggtgcgcaggcctttaaaatcagaacaattcgcccgcacccgattgattcccacattgccgaccaaaagcattccctgcttcccttcgccttccgcttccgccctgagcagccttgccattagatcgacatcggcgctcgacgcttttacgactgccatcatgacacctcccgtattttctcctttcatcatattcagcagcggcccagtgatgacagccaaaagccagaaaacaaatgttcacgaaaaaagggtttatatttcacgttatgaggaaacatactaacatgatttccataaggaggaattcgaatggaacacattaaagcgcttgccattaaaggcattatgaccatcattattctgtatctgatactcggcttaggttttcgctttacattcggtgacgtgctgctgatgaccattgtgctgggagccgtttcctactttacgggcgacctgtacgtgcttccgagatggaataatatcacggcggcgtccgctgatttcggaatcgcgtttcttgttgtctggctgatgggaatgccgctgtccatgggcatttccggaggaagactggcgtttgccgctctcatttccgccgtcatcatcgccgtcggagaatattttttccatatctatctgatgagaaaagacttgggagggtcccgttttttagaaccccggtccgaataatgtaaaaaaggccggataacggccttcagcttgtagagaaaatgatgttttttctgcaagcttttttgttttttgctgtttctttacatatgcccagccttgcttggctgggtatgcggcaaccttcaacatcattttgaataagatcagcggatcaagtgaggggcggcctttattttcgttgcagtaaggtttgaccttttcaacgataaaagagaagtctatgtactgatcaatttttcgaagcaggtgatcctcttcaacgagttggtcaaacagaacgaattcggctgtattttgagaagcgtctcttgtgcgggtcttttattatatgacaggggaatggatattttaagggaaaaataaaggctgtcgagattttctagacagcctgagccccttaaagggggctttttatttgtaaagtaacgctttatacatcttgatataactgataaacccttttcagccttttttcgagctgttcaaaatgaacaaagcgggcttctctcagaaactcagtcccatcaatgaacaaaagaagcacggggacagtgaagactgaaaatctgccggcaacctcttctacctcgtcagcgttggtatgccccaatttgatattcggaaactgatccaaaacttttctgagctgcggcagaacagcgtgacatactgtacaggcaggtcttgaaatgtagataaaactgaattgatgctgcttaataaaattctcgatagaatctaatgaatgtaagtctgtcagctctttcatcaaaaccctccttcaaatcggctcgtctttcatgaccaagctcatcaatactcgtacattcactatacacatttatattgatcatatccgcttttttgcgattcagagcaccttaacgtcgtgcttgaaaaataaaagaacagttaccgcttttcagtaactgttcttagatacttatattaaaaatgcaaagcgtaagctcctgaaccgatgagtgcaactccgatggagactgcaatcagcaccacgttatattcaaaaccgccggcaccgttcgcaaaccctttcgctccatgaacttttacaatggcacctaacataatgatcgttatgatagcagctccaagcgggaggaatacacctaaaataaataaaattccgcttgcgagttccccgagacctgataaagcggccgcggcattgcctggtttaactccaattgactcgaaccattgtccggttcctttaatcccgtatccgccaaaccagccgaataatttttgtgatccataaaacagaaacaccacaccaatcatgattcgaataagtaatagtcctgcatcttccatttttatctctcctcatctttgatttcatctgattctttgctggacggtaccatccagcaatcatcaattgactatatgtttctttattttttatgtgtcaaatcaatctaattctcttacttcaaacggcagcagcccttgttcaatttgtgcccggtgcggttcatactgctcagggagcatcaattttccgcccattgtttcttgtgactcatcatgggcaaagcccggcggatcagttgcgatctcaaataagatttccccatgttctctgaagtaaaccgcattaaaatagtttctatcctgaacaggagtcacaccatatccgtgcgcagcaatgaatctttgccaatctaattgatcttcgtcatcctgagcccgccaagcgatgtgatgcactgtgccgacacccatttgtccgcggccgatcggcgttaatttaagatcaatcacattcccgatatcaccggcagaacgataacgaacgaagtctccttccttgccgactcgctcaagccccatgatgttttccagcagttcacctgttttttcaggctgtgctgataacagggttgcaccgccaaagcctttaatggcaacatccggggttacatctccgaaagtccacgtattggcctcccctgcttctctttccacgatttctaaatgcaggccatgcgggtcatcaaattctatatattgttccccaaaacgctcgatttttgtgtatggcacgttgaacttttcaagtctcttttcccaaaacgccatagcacctctcggcacgacgtaagatgtcacgccaacctgtccgtctccaatgatgccttgacgggcgtccgcccacggaaagaatgtgatgattgttcccggcttcccgccttcatccccgaaataaaggtgatacgtacccggatcatcaaaattgaccgtttgcttgaccaatcgcagccccagcactccagcgtagaaatcagcattctcttgagggtggccgacaattgctgtaatatgatggattcccatcgtttttttagccatttttatgcgctcctttataaatatttaaatatactccacaaactcattcacaggctttcggtagccgcgcggccttctgctttctattttttctttcccgattgtaatcatcatgacgacctcaaattgatcatctatattcaaaatctgtttcacggcttcaggatcaaaccctatcatcggacaggtgtcccagcctttttccttagcactcagcataaacatcatcgcagaaagtgaagcatttcttatcgcctcatctctcttaaacagttctcccctgttttcataaaacgaaacggtgttttgaaccatgtgatcatactcttgtttatttaatacccccagcaccttcaatccttcatagatgtcagccgcttgctgatatgcctgcttatcccctaaaaccaaaagaaccgctgatgagctgaacactttatattgtccgtttgcggcctgcttcagcttttcttttacctccgggtcaagaaccgtcacatattttgtatgctgcaaattaaaagctgatggagccaacgcaaccaattcaaacatttcgttgagctcatctcttgtgattggatgttctggaagaaagttgcttgcagatcttctttcattcaccagctgtacaaattcagccatttctctcgcactcccctttatctcgaattcgagatattatggtataaaaaatcaaataatgtatgatcaaaaaacaaaacgatcggcaggttcttatcctgcactctaattaaattgtctcgaattaaaatatcttgaattcaggataataataaaagataaatactcaaatgtcaacagttcatttttaaattcagcgcaattttgtttatgtactatttagccctgctccaactttttttctgtcaccttatttattagtaaacaggaaacaaccttgctatagacccactcgaaactgaattgatatgataagcaaagtgattacacaagaaaggatacggagagcgaatcaagagcgctcctatttttttgtgcagttttataggaggaaaaaatgacaagtgaaagagaacaaataagcaaaaaagttgctttgattgcattgatagccaatctgatcttaatggcaggaaagatcttttttggactgataggcgatagtgaagcagtttttgccgacggtatacattctgcagcggatgtcgtggcttcaattgctgtcctggccgtcatcggcatttctaataagccgcccgatcaagaccatcctttcgggcatggcaaagctgagatcatcagcgaagcgattgtaggaatcatattagtgctcgtttccgtgtatattctgatagaagcgatttcgtcctttgttgaaggtccaagcatcccgcaatacagcgcattgtttgcggctctgatatcctacgtggctaagcagatcttatatcgttattcgatcaaacaaggggaaaaatggaacagtaaagcgattatagcgattgcatacgatcataaaggcgatatcgttgcctctcttgccgcttttatcggcgtcctattggcgattatcgggaacacacgcggatggtcctatctgttgtacgccgatgcaattgccagtgtcatcgtggcgtacctcatttttaagatttcaatggaattaatcaggccgtctgttgacgttctcatggaaaaaagtgttgatcccgaactgatagaggaatataaagcggttattttggattgccctcaagtcaaacggctcgataaaatccgagcaagagaacacggccactataaattgcttgatgtccggttatctttggatcatgatttgacgattaagcagggacacgatatagcccgggaaatccgaaatgaaatcaaaagacacttttcagatgttgaagaagtgctcatccatgtgaatccttattttgaagaatgaaaaagcagcttgtagagaaaacgatgttttttctacaagcttttttgttttgtgctgtttctttacatattcgtttgatttcactgatccatatgctttctgataaaatgcagcagcgtgtttccttgagcggtcaatatgacgcccttcgcgctgcacttcggacagggcgtcccttctttctcctcgccggttccttcacaatgcggacatgtgagctcaagatcgtcggttgcgatcaccatgaatatccctccttttttgattgtctgtccgtctccagtcactttccatggccatcacctccttaacaacgcaaaaaaaccccgtccatcaaaggacgaggttttcgcggtgccacctttattaacggctgaagagccattctctcaaaaagtacagaaactcagggtttcaatactcctatcttgataacggggaaagaatcccggcaccgcctactgttatttcagcgcagcaattcagaagcccattcggcaccggacggggatcggttcacagcggccaccgactctctgaaccccgcgcgctgatgcgtacttactcttcctcagcattgttcatccgttctatgattttaaaatgtatcatacgctgtcatccggcggaagtcaataacctttcggatcggacagtccgagcatgtcccgcgccatttgcatatgctcctcttgccccgtctgaagcgcgaacttcgccgtttccacagggtaagcggcctgccattctgacacatgctcctgcattttcggccagacgcgcccgccctcagcttcgtagctcttcatcagccgttttgtttctttttctcctaatatcacttgataaaggacaaaatccttggccggatcggcaacctttgcctccgtccaatcgaggagacccgtcacacgctgattttcgccgatcaaaatatgcggaggatgcaagtcgccatggatcagcgcagaaaaatcaggccagtacgagctgtcatttatccacgtttgccatcttttccaaagctgttctgaaaccccgatttctttttttatatgatccattgattccgccgccctttgcctgacgtcatccggttttatgatttcaattccggatctggaggccgcatccgtgtctgccccgtgcagcccggctaatgctgcggcaagcgagccgacaaaaccgtctgaaggcggctcgtgttccatattccagacatactgtttcttatccagatcaattgcggcagccggtattccgtccagtttcggataagcgatcagttccggtgtatgaatccgccaatcggggactgatacagcggcatggctgcggagaaacgcgagaacatcgctttctgcagccgctctttcgataacatcgggacggcgcggctttcggagcacccatgtcacgccgctgtcatcttcagcaaatacgacttggaagtccatacccgtttcatttatgtccgccccttcatattttaaccgtaagccattttcctttgcgatgttcaaaacggattctatttccctttgtttttttgtcatcttgtttccccatttcccttattgactgacacagagcttcgcctttaggcggagaagaaagagatgtgtgaagacgccaaaaagagggcggcataatcgccgccccctcactattactgtcaggttccttattcaggcagacaatcccggtttcctccgcgctcaaggcagagactttgacactatttcattagtgcgaaaaccggaatttgatcagccatcaggatccctccgttccttcttagttaacattattttacacaaaaaccttatatacgtaaaccctatttatcagcttaccggctgcctccgctgacaaattttgatccttcgcgtaaatctttcgcctccaaaaaaaagacgtgaatgaattttttcatattcactttaaccggagaaagcggcacggtttccttggcctgcatttctttcattctcttgctgacagcggggaaatcaaagaatttcgaggcgtaatattcaaatttggggtttgaaaaatcagttgtgcccaatgaagcgaaatggtttaacgaatgaatgacggcccttctgatccgctgttccgaggctttgatttctctgttaacctcggcttgtgccgccgcaggtcccagcttccggatggcggcgtttgtaaacatctgctttaaagacgggatgtttctttccgcctgttcatcctcaaataaatagtgaaggacggccatgaggtcatgcgccccgctttctcccacgatgcctaattccgacaaaagaaattttcctgtttctttgattgatttctcgtgcatcccccccggcccgctttttttcggctcattccgctgaataagacggcttaacgagtgttggatgtcgccgatcgaggtttccagttcaatccgctcttttacttttcgcaaaacggtgacgatctcgattttgttgatcggtttatggataaagtattcgatgccgagagaataagcttctcccaccatttcctttgcctccacctgcgatatcatcactgcttttccgttgtacgccccctgaagatgccgtatcgtctcaatcccgtcccggcccggcatcagcagatcaattaataaaatatcgacttgtttgaaatggagataatgcccttcaatctggcttccgtcctctgcctcaccgacgacttctcctaagtcctcgtcctcgatcatctgttttaaaatggaacggatcgcccggtcatcatcagctataaaaaaacgcatattatgagttcatcctttctgcaatcaaatgcttcaccggcagcttaatcgtaaatatgacgccttttggcttgttatgaaaggaaatgtctccgtcaagttcggttacgatttccttcacgtatgaaagcccgatgcccgttgaaggtgcgccgaattcatcgtatttggacgtaaaaccgggatcataaacgacctctccgattttttccggaatgccgggaccgtcatcttccgcctcaaattcggccatcccccctccgccctgcgcagcgcgaggcggatctcacccctgtcacccatggcttcgacggcattggcggtcaggttatttaagatcgacaggacggtaaagacgtgataatcggggtgttctccttcaatcacgtttttgaattgaatgtctttgcctaaagattcggcgtatttttcattgatgcggataacgaggccgaccagatcggcggcattcatgtaatcccggaatctctcatttgaaatcagcttcgacaggccggcgaatattcgctgattgtcttttttcacttcatgaatttctcccgcaaggcgcagcattcggctcccgagctcccggtcgttcccgctcatttcccgatacagctgataggattctttcgtcacatgctccgtcgttttcagcgtttttttcagatgaatcgtttcttcatataagttagacacaatcatcagcatgtgctcatgctgctttctcgtttgtttttccctgacctgagattcgtgcagcttcatcacgttgaaaaaactcagcacaataaatgtgtgagaaacagcgataaccgcaatatccgccagcttgtccggcatcataatctgcttgccgccggaaaactgaaccgtcatttcaacggcatcggacgccatttcaatgagaaaaccgagaaacccgatcatgagcggccgatcccaaaaaagcctgaccttcagcacataaaacaaacaggcatatgtaaagtaaaaaaagaaactgggatattggctgaaaaaagccgccgtaaatccggcatgctctccccccagcacgccaggccgatccggaatcccacaacggctgcacctgtcaacagccctgacaataccgccggcacatgccgaagcagcagaagaaaaaagaaaaaagccggggcgccgaagctgatccgatatacctcattcagggggtaaaatttcagttcccccgccagcggcacggtgatcagcataagagcgaaaagatagccgtcttttttcagtaaatagtcgagcctgatcataatcacttccttcttctgtctattttgaacaagaccgatacagtccgcaaatttctttagacccgaatggcgggacactccggctgatttataaatctatcggcttattttaagaatgattttgtcgtattttgtatgattctgtagatgtcattatacattaacatggaacacgctatttttgaaaacgttttccaagaccggtttccgcttcggacaggcttgcaatagaggaggaatgttatgaaagatatggtcagagagcgccttgaaaaagaggaactggcttcacttttacaagattgggtcgagcattaccgaccgttttccgtcaatggaaaaagcgcaaattatatacccgccctcggagaaatcaacgactctcagctgggcatttgcatattagagccggatggctcaatgattcatgccggtgaatggaatgtgccgttcacattgcagagcatctcaaaagtcatcagctttattgccgcatgcatgtccagaggcattccttatgtgctcgatcgtgtggacgtggagccgacgggtgatgcgtttaattctatcatccggcttgaaatccataaacccgggaagcccttcaatccgatgatcaatgccggcgccattaccgtcgcctcgctgcttccgggtgaaacggcgcataataaattagaatatctcttttccgtttttgaaaaattaataggaaaacggcctcacattcacgaggaggtcttccgttctgaatggcagaccgcgcatcggaacagagcgctcgcctactatttaaaagaaacgaactttctcgaggcggatgtggaagaaacgcttgaagtgtatttaaagcagtgcgccatggagggtacaaccgaggacatcgctttaatcggattgatacttgcccatgacggctaccatccgatccgacgggaacaggtcattccgaaagatgtcgcgaaactcgccaaagccctgatgctgacgtgcgggatgtacaatgcgtcaggcaaatatgcggctttcgtcggcgtcccggccaaaagcggggtatccggcggcatcatggcattggttcccccaagcgccagaagagagcagccttttcataacggatgcggcatcggcatttacggtccggccattgatgaatacggcaacagcctgaccggcggcatgctgctgaaacatatcgcacaggagtgggagctcagtattttttaatcaaacgaaccaagaggtgattggatgcaggaattccttgaaaatgtaatcggctcggcaaatgattttttatggtcaaaactgttaatcgtactgcttctttctctgggactgttttttacgttcagatcaaagggtctgcaagtccgcatgctgaaggaaatgatccgggttttgaaggaaggcgcggccgcccggacaaaaaacagcatttccccgtttcaggcattttgcatcagtatggcggcgcgtgtcggaacagggaatattaccggaatcgccattgcgatcgcactcggcggtccgggcgctattttctggatgtggattatcgcagtcatcggttcggcttcaagctttgttgaaagcacgctggcccaaatttataaagtaaaagatcaaaacggattccgcggcggcccggcctattacatggaaaaaggcctgaagaaacgctggatgggcgcgctgttcgccgtattaatcacactgtcattcggggttgtttttaattccgttcaatccaatacgatcagcgtcgcctttcaaaacgcgttcggcaccagccggcttacattgggcattattttaatcttggtttttggcggcgtaatcttcggcggcgtcaaacgaattgcgaaaatggcggaatacatcgtagtcgtcttggccgttttatatatcggtgtcgctttctttgtcattctgacgaatatcacccaattgcccggcgttctgtcgctaatcgtaaaaaatgcgttcggcattgatcaggcagcgggcggcgctttaggtgcggccttgatgcaaggtgtaagacgcgggattttctcaaatgaagcgggtatgggaagcgctccgaacgcggcggcgacagctacgacgagccacccggtgaaacaggggctcattcaggcattcggcgtcctgacggatacgctcgtcatttgtacaagcacggcgcttatcattttattttcagacgcttatcaccagccgggactgagcggcatcgcgctttctcaggccgccttgagcgaccatgtcggcgcgtgggcgtcaggtttccttgccgtcttaatgcttttgttcggcttcagcgctctgatgggcaactattattacggagaaaccaatatcggatttttaagccagaacaaaaagtggctgttcatttaccgcatctgcgtgctcggaatggtactgttcggctgtatttccaaagtccagcttgtgtgggatatggctgacttgttcatgggcttaatggtggtcgtgaacttaatcgcaattttccttctgtcgaaaaaagcatttgccgctttgagcgattatgcccggcaaaagaaagccggaaaggaccccgtcttttacagagatgtgctccctgatgacgacgggatcgaatgctgggagtattcagatatcgcgaaaagcgcgaaaggcaaacatatttcctaaacaaaaggtgttcaggcagcgtcctgaacaccttttttccgccggttcattgacaaagagaatagcgtccattaccctttttatatattttcagtaaagtcagaaaggaaggcctatgaatcccattacacaaatattaaatgaatacccggttatgatcatagacggcgcgatggcaaccgagcttgagcggatgggctgtgatttacatgacgatctgtggtcggccaaaattcttttggagagacccgaactgatcaaacaggtgcatgcagaatattttgccgccggcgctgattgcgcgatcaccgccagttatcaatcgacaattgaaggatttgcagcgcgcggcatcccggaaaccgatgcgatacgtctcattcagacatctgttgaacttgccgcacaagcacgcgatgaattttgggcgcatgaagaaaaccgtttacaccggcctaaacctttggtcgccgcttctatcggaccttacggcgcgagcctcgctgacggctctgaatatcgcgggcattacggactgacggaagatgagctgatcagctttcaccgcccccggatgaaagccctcatagaatccggcgccgatcttttggcctgtgagaccattccgtccctgtcagaagcaaaagcgatcacaaggctgctggaggaattccccggcacttatgcatggatcagcttcagcgccaaagacgggcggcatatcagcgaaggcacgcctatttccgaatgcgcggccctgcttgactcctgcagccaaatcgcagcgatcggcatcaactgcacaccgatcgaatatattccgccgctgatagaagaaatcaaacgggcagcatccaaaccgattatcgcctatccgaactccggcgaacaatatgacccggtgacaaaaacctggaaaggcgcagcgtgcgaaaaccatttcggaaaaagcgcgcaaagctggtacgaaaacggcgtgagcctgatcggaggctgctgccggacgaaacccgcggacatccaagccattgccgattgggccaagaccttaaaaacaacttgactaatcggaatagtttgtatattctattcaaaaagccggttcgccggaatctcgtgccgttcgccggcatgagattttttattagaacggccctcgcagaaagttggaaaacaatgaacaacaagaacgagacgaattttcagagaagtatgaaaagcagacacctctttatgctatcactcggaggtgtgatcggaacggggctgtttttaagctctgggtataccattcatcaggcgggtccggcgggcaccattttcgcttaccttttgggcgcgggcatcgtctatcttgtcatgctttgcctcggtgaactgtcagtggccatgccggtgacgggcgcattccacacctatgcgaagacctatatcgggcccgcgacgggctttacggtcgcatggctgtactggctgacgtgggcggtggcgctgggctctgaattcacggcggccgggctcttcatgcagcgctggttcccgcatacttcagtttggatgtggagtgcggtattcgctcttttcatctttttattaaacgccttctccgtgaaattttttgctgaatcggagttttggttctcaagcattaaagtcttagccatcttactgtttattttattgggcggagcggcgatgttcggcctcgtcccgatgaaaagcggtgaggccgcacctatgctgtcgaactttacggatggcggcagcctttttccaaatggctttttcccgatactgatgacgatgctttcagtaaacttcgctttttcagggacggaattgatcggaatcgccgccggggaaagcgccgatccggaaaaaaccgttccgcgcgccattaagaccacagtctggcggctggcgcttttctttatcggaacgatttttgtgctgtcagggatgatctccatcaaggaagccggtgtgattgaaagcccgtttgtcacggtatttgacagagtcggcgtgccttatgcggccgatctgatgaatttcgtcattttaacggcgcttctgtccgcggccaattcagggctgtacgcgtcatcacgtatgctgtggtccctgtctaaagaaggggagcttcatcccgcctttgccaggctgacctctaaaggcattccttttaacgctctgatcttcagtatgatcggcggcattctgtcgttgttgtcaagcgtatttgcagcggatacagtctatcttgttctcgtctccgtctcaggatttgcggtagtggctgtgtggatgagcatcgccgcatcacaatttttgttcagaagacgatttcttaaagaagggcaccagctttcagacttgaaatacaggacgccgggatatccggccgtaccgatagcggcctttctcctatgcctcgcctcctgtatcggcatcgcttttgatccgaaccaggccatcgccctttattgcggaattgtatttatggccgtttgctacaccgcttattacttgaaaaaccggaaaagcagagcccgcgtgcaagccgtaaaatcccaataaccaaaaaaagaaccctgcggcgcaagggttcttttttcatttatacttcaacgacccatctgaacgaatcccgcaccttcccgacttggatgccggcaatcgtttcatagagcttttctgacacttcaccgatcaaaccgttattcagctcaatcgtttctccgtgaatgtgcagcgcgccgaccggcgagatgacggccgcggttcccgtaccgaatacctccgacacctcgcctctcattgcagcctcatagatgtcatcaatggcgacctgttcttccctgacacggatgccccagctttttaacagctctatcacagatgcgcgtgtgatgcccccgagaatgcttccgtttaacgccggcgttacggcctctccgtttatgatgaaaaagatattcatactgcctacctcttcggcatatttcttttccactccgtcgagccaaagcacctgatcataccccagttcttcggctttccgctgagcctgtaagctggccgcataatttccggacgttttgacgtcgcccactccgccggtgacggcgcgcacatactcatcctccacataaatacggatcggtttcagctgatcgccgtaatacgaaccgaccggcgtcaaaacaaccatgaacttgtaacgctttgaaggccggacgcctaaagaaggctcagtcgcaatcacaaacggacggatatataaagaggttcctttttctatcggtatccattcctgctccagctccaccaattgtatcaatgcttccagcgccagcttctcgtcaagaggtggcatgctcatccgccgtaacgatttattcagccgttttatattttggtcaggacggaacatcaacacccgtccgtcttctgacctgtaagccttcagcccttcaaatacggcctgcccgtaatggaaaaccgatgcggaaggatccagatggaccggttcataaggtgtgattctcggatcatgccaccctctcccctcttcgtaatccatgacaaacatgtaatctgtgaagtacttgccaaatcccaatgaagcggaatccggtttttcctttctagctgtgaccttacgtctttcaatcagttgattcaacaaaagcacacctttcttctaattgttcaaattttcagtcttttctgggctgcatgttttttctgtcccgaatcttgtatgcacagatatatgagaatgcagttgaccatatcatatcaaatataccacttataagaggataattatcaaaatttttaatattttcagcggaaatctttctttattcttatgctccttcatttttttcaatgaggactttctgtcatattcaatgattgcgcttacataatgtaaagcaatccttcctttcgcacagtcaatcatgtgacaaatttatggcggacaggaaggtggttgccgcctgcttcacgaattacgtaagaaatgcgcaagtaaaagggggattcgcttgaaaaaatttatcgcattccagattttgatcgctttagccatcggagcattgatcggccatttcttcccggatttcgggatggcgctgcggcctgtaggagacggatttatccgcctgattaaaatgattgtcgtgccgatcgtgttttcgaccattgttatcggagccgccggcagcggcagtatgaaaaaaatgggcagtctcggcatcaaaacgattatttggtttgaagtgattacgacgctcgttctggcgctcggtctgttattggcgaacgtgctgaagccgggagtcggacttaacctctctcatcttgctaaaaaagacattcacgagctttccggctatacggaaaaagtagtcgatctgaaacaaatgcttcttgatattatccccgttaacatcattgacgttatggcgaaaaatgatcttctcgccgtcatttttttcgcgattttattcggtgttgccgcagccggcatcggcaaagcctccgcacctgtcatgagtttcttcgaatccacggcaaatattatgttcaagctgacgcagatggtgatggtcaccgctccgatcggcgttctcgccctgatggccgcctccgtcgggcaattcggaatcgcgcttctgctcccgatgctgaagctgatcggcactgtgtttctcgggctgttcctgatcctcttcgttctgtttccgatcgtggggcttatctttaaaatcaagtactttgaagtgctgaaaatgatttgggatctgtttttgatcgctttctccacgacaagcacagaaaccattctgcctcagctgatggatcggatggagaaatacggctgtccgaagcgggtcgtctcctttgtggttccgtcaggtttatcgcttaactgtgacggttcaagcctctatttatcggtgtcctgtattttcctggcgcaggcgtttcatgtggagatgccgctttctcagcagcttctgatgatgcttgtgctcgtcatgacaagcaaaggcattgccgccgtcccgtcaggctcactcgtcgtgcttctggcgacagcgaatgccgtcggtctccccgcggaaggcgtcgccatcattgccggtgtcgaccgcgtcatggacatggcgcgaaccggtgtcaacgtgcccggccatgcggtcgcctgcatcgtcgtatccaaatgggaaaaagccttcacatataaaggacccgtcacggcagatcagaccgcccggacagaaagtatgtaaacacaaaaaagaccacctcattggtggtcttttctattaatcaatcgccgcatgatcctctttttcaatcaaagcaaggcgttcattgatttcttcctgagtcatttcgtgctctttcacatacatgtttcgttcgttcgtacggcattcgtgactgcagctgcgcatgtatttgtattcattctcaggtgtgcagatcatttttttattacatgccggatttgcgcagttcacataacgctcgcacggctcgcccgtgaaataatcttttccgatgataacgtgctctacgcggttgaccggtacgctgattctttcgtcaaacacatagcactgtccgtcccacagctgcccttgcacttcaggatctttaccgtaagtgacgataccgccgtcaagctgggacacgtcttcaaatccctgcttcagcagccagccggaaaatttctcacagcgtacgccgcctgtgcagtacgtgaggatttttttgccttcaagcatgtctttgtgttcttcaatccagtccggcagctcacggaacgcctcaatatcaggtctgaccgctccgcggaaatgaccgaggtcatactcatagtcgtttctggcgtcgatcacgatcgtgtcaggatcctgcatttgctcataaaagtctttcggtttcaaatgcttgcccgtcgtgacattcggatcaacatcatcttcgagacgaagcgtcaccagctcttttttatggcgcacaaacattttgcggaatgcatggccgtcagcctcgtcaattttaatcggcatgtcggcaaaacgcggatcagctttcagcgcattcatgtattgttccgtctgttcaaccgttccggacaccgtgccgttaatgccttcctcagaaatcaaaatacggcctaacagaccgagctccttacaaaacttcaaatgctgagccgtgaactcttcaggctcatcaatctttacatatttataataaagtaaaactctatattgtttttccatgatttatacaccctgttcaattatattaatgatcacgcacactatactatatcatacaggaaaacgggcgaaagatgaacatttccgtccgtactctttcttccagtcacgcttcgccttttaaaacctgctgaaaataaaaccgatacgtattgcgcaaaaaggtctcaagcgaaaggccggccgcggtctgatacttgccgataataaacggaaaacggtcacggccttttgcccgcagaagatccgcgctgtcttcagccagttctgagatgagcgcctcaacgacaggccggcatgcatcccgcaccgcttcaagaatttgctgatcgcctgtatgccgatactgttcgatcagctttcccaaatccttttcttccataaagttcacttccttacaccatataaaaaagaggagcagcttttataaagcggacgcctcctcctgtgactccgcataaccgatgatctgaccgacctgtaattcacggccttcagtcaggttatccgaaggggtaaacatatctttctcgaatactaaaataacggtcgatccaaatgaaaaatagccaagctcttcccccgtctcaagccggtttccggtgtttgtctgaacgatcgagttaatattcatcgcacctaccggaatcatgagcatctgctgatcagcacgggtcagctcgtacacataacggtaattttttgagagcacatctttcccgtactttaaccccatcgtattaacgggataggagcgtttccccagctcggccagctttttatacgtgcagctgacgggagaatggaagcggtggtaatgtctcgggctcaggtaaagcacggcaaaacacccgccgttatacttgtgatcggcgcttttaaaccccgtcagttcggcgaacgaataatccttcccttttaccatgaaagtttgattgggattaatcatgcccaccgtctgaacgacgccgtccaccgggctgacgatggcgttcttctcttttgccacggggcggagattcaaattaatatcacgaatgaaaaatgacgccagtgaatcaaagtcagaagccgtgcgttccgtttcattccagttaatgcgatagtgtttggaaaacagcggaatcatcggcttgctcagtttcgattcacagaagtttttaatgagataagacgtcaatcgattattagtcagttcaatcaatgaacggtaaagaactttagcggcagtattaaacattgattactcctatgaattttcctatagtaataaaaataaaacaccataaaaacgctccgatggcggcgaagcataagtaggttttgaattccattctgccgattccggaaaagtagcaggtcacgtgtctgatgccggggatgaaataacctaaaataatggtgtacggcccgtacttcttcatccacctgtctactttctccatcctcttttccttcaggccgacccatttcccgaacttattaataaacggccggccggcttttctgccgatgaagtagctgataatcatcccaaggagcgctccgataaagctgatcagaatggagagcccgtaattcagcacgtttaaatgagcgaagtagcccacaagcgtcatcatgacttcatccggaataggcaatccgataataccgagtgtcagcataagaaaaatcgcgatatatccgtaatcggatattaattgctgaactaattccatcttctgctctccaggttttcaggcgcctgttttttaaagtgcggaaatttaatgttgctgaccattaaataaccgagcgcgatcgttcccgcccccagaagaaaagcgttattgataaagctcaaaatgacaagacacatacccgcaaacggaatcggcatcccgataaacgtcggcagcttgctttgttcaatattaaatctggaaagacggatcatcccgcagatgctgtaggaaagcgcgattaaaattccgatgaacggaagcgtatatagtgaaacactgtaagcgagcatggacggcgctacgccgaacgtcacgagatcagcaaaagagtcaagctcccttcccatctccgataccgcgttcagcttacgggcggccaaaccgtcaaagaaatcaagaaacatcccggtgaaaataaagatcaccgcagagtgtatattatgatacaaaagggaatgaatcgataagagcccgcaaataaaatttccaattgtaatcatactaggtatataattcacagtttacacaaacctccaattaaaaccatatcaaatcggactgcgtatgcataaagactccattttacggaaacataaaatgaaatcctttcaatgctatcattcaaattcttttattatacagcatttggtgttatttgaacaatctaatctggtgatttttgttttttcgccgttcatattaaggtaagcaatcatggtttcctctattccggattaccctgcttaaatattccatgctgcgatccggattgtccgttcttgatgaatgaaaagccgtatgatgtattgttatttccttctccgtgaaatgagaacattacatataacgattgcggacataaaaagtttcaagaattaaaaaaccggcacaaaacggcctcatacattatctcacaaccccgttttccagtatatagtctgtccaaacaaaaaaggcgccttaccattacggtaaaaacgccttttaagatcattttatgtaattgataaatgactgagtgcttcggccgctctttctctggcctcttcaacggtctcggctgcagaaagcgcaaccgccatacggcgtccgactttcgtgacgggtttaccgaatacgcggacctgagtgctttttaccgccaaagctttctccaaaccttcaaccgcataatcagcaagctctttgggcgccttcagcggacggcttgcccccggcgacagctgaatgatttccggaatcgggaatcccaagaccgcgcggacatgcagcgcaaactctgacaaattttgcgtcacaagcgttacgagccccgtatcatgcggacggggagacacctcgctgaaatatactttatcttcagtaaggaaaagctccaccccgaacaaaccgtatccgccgagctcatccgttatgcttttcgcaatgtgtttcgcctcttcaatctgctgttccgtcatatgatgaggctgccatgattcaatatagtcaccgtctttttgttcatgtccgatcggcgcgcaaaaggacgtaccgttcgccgcgcgcactgtcagaagagtgatttctgattcaaacggaatgaattcctcaacgatgacccggccgtttttcacccggccgccttccattgccatgtcccagcagcttttcagcccggaagccgagcggcacacgctttgcccttttccggaagagctcatcagcggctttaccacgcacggaaagccgattgtttccgccgcttctttaaattcttcgtatgtattcgcgaattcatagccggcagtcggaagatgaagcgtctctgctgcaagccgtctgatgccttcacggtccatcgtcagctttgccgcacgcgcattcggaatgacgtgaaacccttcttcctcgagcttcagcagctcatccgtcgcaatggcttccacttccggcacgattaagtccggtttttctttctcaatgacttctctgacctgcgctttatcaagcatatcaatcacatagcttttgtgtgcggcctgcatggcgggagcatgctcatagctgtcaacggctacagtgacaaccccgagccgctgcgcttcaatgacgacttctttccccagctcgcctgatcctaataacaacatcttcttcgcctgatacatgtcctttggcccctccctttctataccccactcattataacggaaatattcaaaaaataaagacaagacagattacaagctctatcctgtcttttgtgctgattcgagcgattcaatcgccgctgacacgtccttcccgcaatattgccccattaagcataacgattcttccgcccggcaggcgtgagaagcgatgcggcgctttgcttcctcatggttgtcaaggatgccgagagcacagagactgacggggaaaccgagccggcggtaaaacggaagcagctcttcaatctcatgtctccgattctcaagcgcgagctgcaccaatatgccgtaagcaaccttctggccgtgcagcacctgatgtgtctcctgaagaaaactgaggccgttgtggaccgcatgcgcccctgccatcctgcacaaacggccgccatacccgccgaccgttctcgcaagcataatgatcgtttccgccgtatggatgaacggcacggacagctcgcctttctccatgcttacgacggcggcttcactgtaacgcaataacagattacgcatatattccgcctgtctcagccccgcctgcgccatcagaggcggcgcttcctccgtatttctgatgaccgcctcggcctcataccatttcgccagcgtatcaccgatcccgcttttcatatattcaatgggagaggaaagcaaaaacagcggatcaacaagcgtcaaatagcttgaacgcttgtgataatcaactctgataaaattgccgctctcatcatatatgacactcaacggcgtacttgccgcacacgtccccgcaatggaaggaagcatcacagcctcaatatcaagccggtctgccgccgcttttgccaaatccaaaatcgtgccgcctccgataccgatgatcacatccgcgtcttccgcctgcccgcagaccttacgcaccgcctcaggtgaacagtatcctttgtgctgaatcacatcccaggaagaaccgccgccgtaatcggagaacgcctgataggatttgattccggtcacaataacgggttttctgaatgtctccagcagccccggaagttcttttgcgattccttccttgcatatgtactgattcgggccgcttcggacgatatcttcaggcttcattcgaatctctcctttggctggaatttatacatattttctcacttgtcagaaaatacatcaaccggaggtgcgtcagcgcttcgcttcctccgcctccaaaaacagctcatcaagccgctccaaagcttctgccttttcaaaactgctgaaccacagatcatcataagaatcaaggatgcggtaatgatgggaaatcaaatgctgctgcaagcggaactcgccttttttctcgatggctttccaccacaccttgccgcccatcgtcttccccttcggcctgtcaattgtgcggtgagcaaccgtttcaatgacctccagcggatcatctcctaatacggattgcagtgtttcacttgatctgaaaagcgcgcaaaccgccacaacgtgcggccattccgcaagcgcccgccctttctcaatctgcaccagcgactttttagaaaggccgatcacatccgccattttctcctgtgtgtagcctctctccgaccggattttcttcagctggactgagacaagctcagtcatataatcttgatccatctcaacctccatttttatcaatatagccattttacaccgcggcacgccttttttatatcagaacattttcaaacaaatcaaaaggacccgggatcggcttttcattgaaacgatgtacctttccgcataatccagaatgatgcggtgaatacaaacgtacgcccgaagagacagatgcggtctccctggcggttgagctccggagaaaataaaaagctgccgcagctgcggcagctaaaacattataagctgaaaatcaaaattatgaagcgaatacaatccaactcgcactataattgacacgttttttcgaaccttgattgaccattttaaatctgtatgaatctcctttttttaacaaaggtgtttcaaaataagtcgttccatttttctttgcattggcggttttgattgttttccaggcacctttgccgttgacttgcttttgaacgtatattttatacgtgcccttccctttactgttggatttaaaagtcacggctctcaagctgtacttttttgtcgtcttagtgaatttaggatgatatgtattgatcacatagttagtgaaatacccgcttttataagtatgaagccagtctttagcctctgctttttgcggagaagaaaaacccataaaaccaattccgctgattaaaagagtaaaaataatgatgagcgacttaaaaatctttttgcttttcatcgagaaaatccttccttcctgtaactatttaccctatttatgttaatgacaatatagctaatcataaatccgtccaactaaccattttgactgcagggagagatgaaaacagccctgaaaatgactatatgactactacttatgattcttgttatttttgattaagtgataaagttactttaaagcgctatccattttgctgtttttgtatcaattgtcatagagagatcttttcctatcaatgcctctctatcggcgtttgtatgatggggctgtcctcggacaaactcctgcacccatgacaaactgtcatacgtttgccacctatgaatgaacgcacactacacgtaatggagggattgcaatggacgaaatggtcctggaaacacaacaatggctgaatgagacgtacaaaggcagacacgggtacaacaaggtgccggaaaacggaaaaacaggctgggataccatttacggtctgacacgggcgcttcaaattgagcttggtatttcagaaccagccgataacttcggaccgacgacacaaagattgtttaaaccgttgaaaaagcaggctcccgattctaagccgacaaacatgaattacattctgcagggggcgctgtggtgtaaagggtttaacccgggcggattttctggcgttttctatgaaaataccgaaagcgctgtaaaagagtttcaaaaagcggccggacttactaagcaagacggcattgtcacggcactcattatgaaggctttgctggatatgagcgcttttcggttagtagcgggaggcgacaaaagaatccgccaaatccagcagaacctgaaccgggattacaatgactacatcggcttgatgccttgtgacggcttatatgcccgcgatacaaacaaggccctcatctatgctctgcaaaaagaagaaggcatgagcacaagcgtcgccaatggatttttcgggaacggaacgaccagcttatgtcctaccttgactcccggcgattcacggacaggctttgttttgattgttcaatacgcgctttactgtaatgggaaatcatttgaccccggtgaattcgacggaaaatacggcgtcggagttgtatcggcagtgaaagctttccaagaatttatgtgcctgccgcagacaggttatgcggacatgccgacgattaaagctttattatcaagctcaggcgacacaacgcgggctgcttcagcttgtgacaccgctgccattttgacggcagatacggctaaaactttgcgtgagaatggctataagatcgtgggaagatatctgaccgggaatgtgcggactagcagcggactgacatcgaaagcgttaacgtcaaaagaactttccgcgattttcaatgccggcttaagcgtgtttccgatttatcaggacggcggctatgaatcttcttattttgtaaaagaccaaggaacgagagatgcgtacagcgctgcatcagccgcccgaagattaggttttccgtcaggaacgaccatttactttgccgtcgattttgatgcgtatgattatgaagtcacggataaaatcatcccttacttccaagaaatcaagtcagcttttatgaaaatgcaggcgttctcaactgcgccgaaatatgaaatcggggtatacgggccgagaaacatttgtatccggacgtcagaagcaggtctgaccaaatatagctttacggctaacatgtcgaccggattcagcggcaacctcggatacccgatgccgaaaaactgggcttttgatcaattttatgaaggcacgatcggaagcggagcgggaaaagtcgccattgacaaagacggatactccggaaaagactcgggtgcaagcagcgtccatccgccttctgatcccgtgtatgatgcaagactgcgcacactgacggacattttaacaaccattcctgctttagaaaatatatcgaatcttgcgaatgccatgtttgaattcgacaagacagaaaccatttatgcatcacctgaaatggatattcttttatctacttcacttttggcaacagtgccaagcgaaggttctcccaacacagttaccattacaaatggcaaaccgggagcttatattaccggtctgatgggagattcacaagtctcttttacagcatcacaaattgattcgtatcaaaacctgcttaacagtctgagcttgtcagtgcgcaacggttatttagaagtgtatgtcaatccggctgcgggatcgctgaatattcaatttaaaatttatacacctgatattccggtcggtgacagtgctactactggactaacaactaccattacatttaaaataaaacaaaagagcttcagattgccggattccgaagaggtgtactctccggattgggattctgtcgtgaataccatggctattgcaggcgcaggaattattgttattgtagggatcggtgctttagtcgttttagcacctgaattaggaggagctgcagccttgttcagcacagttttatcactatttctataattgaacaggcagctccttgctccaggaatgctcaatgagtattcttggagttattttttaaggaggattcgtatgaagattgatatgcagacatacaaggacaccgttcaaaaaatagaaaatgatttgattccgcgaagtcaaaatgacaaagaactgcttacatatttaatgaaacaagattcgctcacactgaatcaaatgaaaatgtgtttcactgaaccgctcctcaccttccaacatactgtcaaaatcgtatgtacagtcacattcatcacgttatatatcttttttttcagcactcattttaatgatttgattgaaatggctctgcagatggtttttggcctggccggccttgtttggatttttgctgtatttccgttttcaaggaaaatccaagtgtctgaccgtttcagacaaaaatctgaaaacacccgtatcaccggaatgatagactttgtcctcgaacaacgatacaaagacatgatcagttaaaaacccctctgcttaaggggtttttttatgatgcaatcccttcaccccccttatcaaaaaaggctcttcccctttggaaataaccggaacacccaatttcgttttcaatataatgaggtagtggatctgcaaagaaagaagggcgacatgatgggtatcattaatggcaaaatgttcattgaccgattaaatcagctaggaaatgagatttggcttgatggtgaaaagatcgagggacagatttctgaacatcccgcatttaagggccttctggaaacgaagcgctctctttatgatttgcaaacgaaaccggacatgaaagatcaaatgacttacagtcttcccggtaaaaaagaacgggccgggctttcatacctgcagccgaaaacgaaagaagacgtaaaaagaagaagaaacatgttcgaacattgggccagacacacgcacggaatgatgggacgaagcccggattatatgaataccgtgctgatgagcttcgcctcctctgccgcgcttttgaaagaccgtgatcaatgttttccggaacatgttcaagcgctgtacgaacgcgctgccgcacaggatctttcttttacgcacacgtttatcacccctcaggtgaatcgttcacaaatgggtgtaaacgtatcgccgacacctatctcggcaaaagtcgtcgataaaaatgaaaaaggccttatcatacacggcgcgcggattttagccacacaaggcggcctgacggatgaagtgctcgtggtttctctgcctaagatgtattttgaatcggatgaagcgttcgctttttcaatcccttccaatacaaaaggagtaaaattcatctgcagggaatctttcgtactcggaaaatcatcgtttgattatccgctcagctcaagatatgaagaaatggattctatcgttgtatttgatcacgttttggtcccttgggaacgcgtatttttttataataattacgaggcggcttttgattttaatatgaaaagctcttttaacgccttcgcatttcatcaagttatcacgagacaaattgtaaagacggagtttctcctgggcctcgcccaaacgcttgtcgatgcgatagatgtgggggaatatcagcatattcaggccaagatggctgagatcatcaccggtctggaaacgatgaaagcccttttggaaaagtcggagaatgatgcggaaacagacgaatggggttatatgcgtccgagtgtcactccgcttcgcgtggtcagcgcgattttccctgacatctacccgcgcttcacggaaatcatccagctgatcggggcaagcggaatggtgactttgccgactgaaaaagcgttccgttccgacatcagaggagaccttgaccaatatttacaggcggccgaattgaacgctgaggaccgggtaaaagtgttccgcctcgcatgggatttgaccatgagcccctttggaacaagacagacacaatatgagcggtacttcttcggtgaccccgtccgcttagccagccatctgtacagaagctatccgaaagaagaacagaccgcggtcatcaaggaattcctgcacattcataaataaaacaaagcagagaacgcatctctgcttttgatagctggatcggctgccgccgatcctattttttgttttggctgatcaccaccatcgtaatatgcgataacgcgaaagagacgagcgtgtacacgacggcccacccgataaacgagaaattcaatatggtaaaggtgcatataaggcaaacggctaaagcggcagccggcataatgaacgcgtttttaaacaggtacgttccggcgactgacaggatgatgatacaaagcggcagaacaccgaacgcaaaatccaattcatcaatcaacagatgcactcccttcgcttttcttagttcggcctaacacatcttatgcctgagtacaaaatcgagtacatcaaatctttcgcgctccggctgatattccctccggttatttattcaaaaaaatgaaaactttccttaaagcgtttacattcacgccagactgtgataatttaagaaagcgctatcatatacaagttaatgatttttggatggagatgaggagaaccaggaaaccgcgccctttcataagggtgatttctggttctttttgtcattttcaaggaaaggagtcatacatacatcatgatagacgttcagcaaaggggaggatatgatgtttcaattgttcaagccggctccgcatattgagagattggatgattcaaagacggatgcggcctataaacggctcaggctgcaggtatttttggggattttcatcgggtatgccgggtattatttacttcgcaaaaactttgccttcgctattccttattttcaggaacaagggttttcaaaaggggaacttggcttggtgcttgcggccgtatcaatcgcttacggcttcagcaaatttattatggggatggtgtctgaccgctgcaacccgaggtatttccttgcgacaggtctgtttttgtcaggtgtcgtcaacattttatttgtttccatgccatgggtcacgtcaagcgtgacgattatgtttatttttatgtttattaacggatggtttcaagggatgggctggccgccttgcggacggacgatggctcattggttttccatcagtgaacgcggaacgaaaatgtcgatatggaatgtcgcccataacataggcggaggtattctcgccccgctcgtgactctcggcatcgccatgtttgttacttggaaaagcgtatttttctttccggcgattatcgccatcgtcatttcatttgtgattgttcttctcgttcgggacacgccgcaatcctgcgggcttccgccgattgaagaataccggaatgactatccgaaacatgcgttcaaagaccaggaaaaagagatgacgaccaaagaaattcttttcaaatacgtgctgaataataaatttctgtggtatatcgcatttgccaatgtctttgtttatttcgtgcggtacggtgtcgttgactgggcgccgacttatttgacggaagcgaaagggttctctcctgaagattccagatggtcttatttcctttatgaatatgcgggaattccgggaacgattttgtgcggctggatcagcgaccgatttttcaaaagccgccgcgcaccggccggcgtgctgttcatggccggcgtatttatcgctgtattggtctactggcttaaccctgccggtcatccgctcatcgataatatcgcgctgatcagcatcggattcttaatctatgggcctgtcatgctgatcggacttcaggccattgaccttgcgcctaaaaaagcggcgggaacggcagccggcttaaccgggtttttcggctacatcggaggctctgctttcgccaacgccatcatgggttatgtcgtagaccgctttgactggaacggcggctttatcatgcttatctcctcatgcgtgctgtccatcgtcttcttggctatgacgtggaatacaggcaagcgggcggagcatgtgtaagaaaacaacataaaagattaatatttttgcagtacagcatttacaacgattttctacactagagacagatattgatttttaagggggaagaaaacatgcggaaacataagttgtttgctttggtattgctttcattcggtttattgtcattcatcgtcacgcctgtatcggcggcgggaaaaggaaacctcttgtctcctgacagaattttaaccattgcccatcgcggtgcttcggggtatgtcccggagcacacgatcctttcttatgaaactgcgcaaaaaatgaaggctgactatattgagctggatttacaaatgacaaaagacggcaagctgatcgtcatgcatgatgaaaaactggaccgcaccacaaacggacaaggctgggtgaaggatcatacattagcagagattcaaaagctcgacgccggttcttggttcaataaggcctatccggaaaaagcaaaaccgcaatacgccggacttcgcgttcccacacttgatgacgtgttaaaacggttcggcagacatgcaaactattatattgaaacaaaggcgcccgaaacatatccgggtatggaagaaaaactgatcgcctcactgaaaaaatacaaattggcaggtaagcatgcgaaacttggacaagttatcattcagtctttcagcagggagagccttctgaaaatcaaacagctcgatccgaaacttcccgccgtccaattgcttgaagcggaacagatgacctcaatgactgacgcagatttaacagacatcaaaacatatgccgtcggaatcggaccggattacaaagcgctgaacgctcaaaatgtccgaaacattcgcagccacggcctactgcttcacccttacaccgtgaacagcgagacggacatgcgccgtctgctgaattggggcgtaaccggtgtgttcaccaactatgcggatatatttcaaaaggttaaaaaagaatataaatcataaagccagcatgggttcggagatgatgccgaacccatgtttttttgcctgatcaaaaaaccttgcgggaacgttaccgcaaggtttttatcaatcattattcttttccggcagcggcttccgcctgcccgccttttaattgatcgttgattgctttggcgtctttcaaatactcagtcttgaatccgctcttcagcgcccacgcatagaaggcaagggcaacgattgcgatcagccccatatcccatccgtacggaatgatgttcagaccgccgaatttttcacttccgagccatgaaatgaccatcatgctgagcagatagacaaccatccaaacgccgcctttaaagtttctgcggaatcctttccacttcgctttcgcttggtagtagaaataaatcggaaggccgatcaaaatgataaacagcacctgccctgttaacggccagcgcgcccaatacagcacgagagacgcgaacacgaagccgagcggtgcaaccacgctgagtcctttcagacggagaggcctgtacaaatccgccgccgtcctccgcagcgtcattaccgtcacgggacccgtgatataagaaatcagcgtcgctacggaaatgatttcagcaagcacgccccatcctctgaataaaaacagaaagataaacgatacgatcaggttgaaaatcatcgcttggcgcggcacgccgtacagcggatgaagctttccgaaaatgctcggcatatatttatttttttccatgccgtaaatcatgcgtgacgtcgtagcggtatatgtgatacccgttcccgacggagatacgaacgcatccgcataaagaataatgacaagccagttgatattcaatgcgatcgccaaatcggcaaatggagagttaaagttcaggtgactccagccgtgaacgatcatggaaggttcaaccgcaccgataaatgcgatttgcaataggacgtaaatgacggttgcgaccagcagcgaaccgacaaccgcaatcggaatcgatttgccgggattttttgcttctccggccatgttaatcgggctttgaaacccgttaaacgcaaatacgatacctgatgtggccaccgccgtcagcacgctcgcccagccgttcggcgcaatgcttgaaccggatgtgaagtttccgccgtgaaaaccggtaaacagcagcgctccgattgtcagccccggaataataattttaaagatggtaatcaatgaattcgcttttgaaaacaagttaactgtccaataattcagtaaaaagtaaataatcagcaatacggatgcgaagccgagccctctcccgtaagtgtgccgttgtgaacgagattgcttgtccactttgcccagtcccacggccatgagctcatatattgaacagacgcaaccgcctccaccggaataacggaaacaatcgcaatccagtttgcccatcctgcgataaatccaataaatgatccatgagaatattgagtatattttaccattcccccggcttccgggaacattgaacccagttcactgtaagaaagtgcgataaacaaaattacgatcataccgataatccaggaaataattgcggcaggtcccgcaatctgagccgcccgccacgccccgaataaccaaccggagccaatcatcgacccaagtccgaccatcatgagtgcaaacgttcccattctgcgatgtaattgattcataaagttaacacctttcaattaaaatatgactccagcgctatcatatatttataatattattctgaaaatagttttgtcaatctttatcgcattaaagcggcaagccaaaattaaccttccgatgtttaaacagccgttaagcgggaataactactgcaagccataaatagaaaggagtttttatcgtgaaacaaaaactgctcatttcaggacttgccgtgtcgactgtcggagtgacttcctacctgctcaaagataaatcaaaccgccaaaaggtgatgaactttatccgcaatatgaaaacatcgctctccgggaagcaggatattgaatcattccccgtcaacaaagcaggcaacccgcatcccgaagatattgaagataacaaaatggtatccgaaggctccatgtacccggttcaatattatgatgacaagaagaaataatctgtgcccgggctgcccggccgtatcaaacggcggcagctttttttatgcagacggcgttttatagatccgccaatattggcgcgatcctttctcccgcacggtaatgcccagtttggatatttccgctttcagctctttcgcatcagccttttcctcctctttcagcgccttttctctcgcttttaaaagagcatttgccccgggctccaaatccggcgtgtccggcacccaccgtttgtattcttctttaaaaggatcttccgtccccagccagacatacccatgcgcgcgaaacgcatcagccgctttttcaaccgccggctcaagcttctcccgaaaaagctcctgtccttcagtgcctaataaaacaagatacttcccatccgtaaacacaccggaaatgctgtctttcgaaaacacgctttcttcattatatatggttaaggacaccccgctgtccgtcacgactgccacaagactttctttaaaagctgcccgcgtcagccacactcccccaattaagccgataacggcggttgcagccgcagccttccatccgtgaaaggaagcgattatttccagcggcccgtgaaaaggcagccaatccaatgttacggcccacttcgtaatgaccggcagaaaccatccgatgaccagccccaataatggcggcaccagataaaccaaagctttttcaaccgatgacaactcaagaaccgtctgtttttttatttcgttcatgtttctcctccgtctgtgtttttcacaactatccattatacaaagggttggatgattctgtaaactggttccgaaacaataaaaagcctcccggccgccgggaggctctttaaaatagaagctcatatacttcattcaattccatcgtgcgcttctcatcctgctcgttctcagcatatttgatttccttttcaagcacctgattcagcgcatccatttccagatcatttagatctttcacgaactcgccctcatttgcataatgcttcacctgaagctttttataaaccccccggcacacatcatgctccaagtggttcgaaagcgactcgcgcaaatatccgagtgtcctgtccatcatgtaagccctcccttttctttaggaatagcttcccggaaagagagaaaaactatacatgaaagcaccgggcggctgttttaactctgtacctgaatggagaaaaatccgctgcttaacggcgtgtacggcccgttcagccccgttgcggagaaagagaacgttcctgaactgacataagaaagaggaacgctgtaatatttaatatagcctgtaacgatattgccgtttttcgtatattcatcttccagcgcttttgacgtaagatttgtaatattcgttccgttgttaaacgcctggatcgtattattgttcggatacccttggaaatatacggctaaataacccgttgtccccttcatcggttttgatgcgctgatttggttcggaccgatattttcccattggtaattctgaccgtcagacgtcacaccgataatacggatttgtgttaaagcaggagccggcgccgcagacgctgacggaacccacaacccgctcacaagcaacaaagcagcggcggccgcggcaaatagcataacgagtctctttttcatgtttcttcctccttgtggttcaaatttataattatgttaaatattataagtttcattttatcagagaaatcaatagatagacagaatcaatcagtcaaattggtgaactttttatataaaaaagctatctcctaaaggagatagcttatataacattatttctttccacactccaaaattgtgtatttactcggagtctgaattacatttaatagtgttaatccggctttttcaatcaattgttcaaactcggttatctttctgactctgccgcctgcagagcatactaaaaataataaatcacgaaaagcttcttcaggggacagcctgtctgcttcaggcacattttcaactataatcagcttggaatgatcagacatggcaccggctatattttcaagaatagcaaccacatgctcatcatcccaatcgtttaacactttgcttatcacatacaagtctccgccggaaggaatttcctcaaacatactcccttccgtaaactgacagcgttcgctcatctctgaagatgctaaatgcttttttgcactttgtatcgtttttggaagatcaaacaatatcccctttgatttaggagccacacctaaaatgcctgttattaactggcccattcctcccgcgacgtctacgataacatcaaacttttcaaatgagtaagctttcaatatggatggcagactcatttttgaataaatctccatcgccttatccattgtttttaagtaatcttgatcaagactattattctcataccatttatcaccataaatggcttcaaaagcggatttgccggttttgatactataatccattttaaacatagactgcactactgtttcatgcagcagatattctaccaaaggctcaatggattttgctttcccaggcatcaaagtggcaccatactctgttacatcataatagccattttgagcttgggcgaccaaaccgacggattccagcgctcttaagagcctgaataaggcagaggggttcaattcaagggcttcagctatcgcttccgctgaagctggtccattttgaaaggcggaaaatacatccaattctaccgctgttttaactgccagggaaaaccccagccctgaaaccatttgcatgactgcggcctgaggatatttcttcggtacttgtttatcttgctgaactgaattggtcatttacgttaacctccgattaattaaatggtttctgctgcttttttgatataacgcatatactgattgagcagattttctacagtactcttatagtactgattttgattatattcaattccaatgctcaattttttctctcttaccaacacaataaacttaaacttgtaattccaaatttcatcttcacttatatcattcccggttgaaagcggagataccgtaaagctttctgtgtgcagttcattatcaaattcgcccatataattaaatgaaatgtctggttttgatttctcttttatatcttgttttaaatatcttaaaataccatatcctatcccttgatcaggaatattggctaaggtcgagttaacattatctaaactcgaaccgatatgatcagaatcggagacctccaaagccaccggatagattgcagaaaatctgcctactgttctgtagatattaagcttctcactctgatgagtgcggccatggttgcctaagtgcacgagagatgtattactgcctgtttgatgttttactgtcaaacctaaagctgtgagcaaaacagtctcaatagtgaaatgatcttgtccttgaatcgcattcattatattttcagtttcccgaacattaaactgcctgtacacttgtctgttatctttgactttggcaatttgcccctgaatatcaaccggaatagacggagcataaacattttcgattttcgtccaatactctttctcaaacaacagccgttcactttcagcatatttatagagataatcagaccattttaaatacgaatcggttttatttggtaatacaatgtcttcgttacttttaacttgctgatatgctgtattaaaatcttcaagcagtattctccaagacatatgatcaatgatcatttggtgaatgacgattaacagatgttccccatctgcttccttaatgagtgccaatttaacaagcgggccgtgagtcagatccatactggcttgtatttgatttattttcatttttaaaactgattgcggcatgtttattgcattgatcagatgaaagtcaaacaagtcgccgtccgtcaggcctctgattacctgtaccattctatcgcctttacgtttgaatactgttctcagactgtcatgatgctgaataatccgggtgaaaatgtcttttacaatatcttcgccaaacccggcttccctgtataacataaaagaaagattccgatggtgcagagtatcattatggctttcagccagccagcattgaattggcacaagacgggcttctcccgttatcacactgttatcagatgccgctgttatataactgactttattcgaaactccttcgattgtctggtaatgaaagatgtctttcacttccagcctaagattgaatttttccattctgaccgctgcttgtatggctttaattgaatctccgcctaaaacgaaaaagttatcttttatactgattttagaaacttcaagaatgtcggaccaaacctcactgacgattcgttcaatctcgtttctcggagcaataaagtgatgcagctcggcattattttcagctggaagcggcaaacgttttacatcagtcttcccattgttcgtcaacggaattttatctatgccaataatgactgtcgggatcatatattccggcagatattccaataagtattcttttagctgagaaggcggctgcgtatctttacatactgtataggcatatatctgatcattgtgagcaatcgcaaccgcttcttgaacattgcggtgagacagcagtctgtttataatctcatccagttcaattctaaatcctctgatttttacttgtcggtcgattcttccggcaaattctatattcccatcctcattccacttgcctaaatctccggttttatacattttctcaccagaatgaacaagatccgggataaatttagccttggttagttcttcacgattgcaatagcctcgtccaactccttcccctccgatgtataactctccgataactcccggcggcacaggcttctgctgtttatctagtatgtagatagaacagttttttatcggtgtgccgatagggattctctttatattggaaatattatcctggtttatcgtataagctgcagcatcaacacagcattccgtcggtccatatacatttgttatataaggacggtcattctttttaaatactttatagaaacgctttacttcttcaggtttaagcacttcgccgcctataataaaatgttttacacctatacggccacactgcggagactcagagagcaggctgagataggctggtgttccatcagaaatagttattttattttggatatagaattcagcaagtttcgtgatatcatgcctggcttcttcagagacgatgtaaagagagtgtcctaaaagcagtgcagaaaaaatctgtttgacagaagcgtcaaaagaaaagggtgccaacaacgctacattctgctgcccgccatgtttgcagtagatacgttcatgcagggcttctgttaaattcgctatacttttatgttcgatcatcacaccttttgggtgtcccgttgatccagaagtgtagatgatataggcaaggctatgcccttccgttcctcctttaacattcctcccgtcgtctggaactgtttccaattcattcagacaaacactttctactccgtacctttgaccatgattgttgcgatccgtcagtaacaaacgggccccgctgtctttgagcatatactcaactctttcttgcggatatgatggatcaattggcagataagctgctcctgcttttaaaattcccattattccgatgataaaatcagtggttcggtctgcagctatgcctactgcttcattctttttgacacctttttgaatgagtgctcttccaagccggtttgcatttttgttcagctcactataagttaagcttccgtcttgtgcagacacagctatttgattcggcgttgcttccgcctgcttctcaaaaagctcacagatagatgcatctgtgcctctgcttctcagtgatcttccactgtaactcaatatttcgcgtcgttcattttcttctaaaatgttaatctccccgattagtccatcttgactttcaacaatatgattgaggatcattaagaatcgctgtgagaatttttctacagttgtgcgcttaaacaagtttgatgaataagtgaactcaaacttgatatcctcttttgaaggaaatgcttgaagcagaagatcaaatttggctgttttgttttcataaagatacggcttatatttcagcccatttacttcaattgccggattatccatcagctgaaggacaaacataacgttgaaaagagcattctggtttatatccctctcaaggttcaaatggtctacaagctcttcaaaaggataatcttgattttcataagctagaagcgcattatccctaacggcttcaagcagttctttgaatgttttgtcggcagatggtttatttctcagtgccagcgtatttacaaacattcctatcatgttttctaattctttatgctttcttccggctacaggtgtgccgataataatatcttcttgaccagtaagtttatggagaagcacattaaatgaagccattaaagtcatgaaaagggtgactttttgttttgcgtttaattctgttaacttggcagtcagctctcttcctgcataaaaatagattcgttcaccttgatcatctcgttcggcttctcttgaaaaatctgcgggcagattgagaacgggaatttctcctttaaactcatttaaccaaaaatctttttgttttttcatttcttcagtatgaaataattcattttgccatatcgcaaaatccttaaattgaatgttcaatgacggcagttcgttgccttcgtataaatttatcaattccctttggaagatcgggatagacgccccatccgctataatatgctgtaaatctatcattaaaagatgtttttgatgactaatctcggctaatcctgcacgcagtaaaggagccttttctacatcaaacgggcggacaaaattagacataaggctctctaattcttcttcggaggtcttgattctatccattttaaatcggacgtctttttctatgatttgcacaagctgcccgtcccttaaacctatggacgttcttaaaacctcatgcctgattattaattttttaaacgcatcttctaaacgtttatcgtccaactctccttcaatcattaaaaagaacgggatattataagaagtgctgtttttatttaattgatctagaataaaaattcttttctgtgcagatgaggcctcataccactctaaatcgcctgctttgggaatcacattcacatcatttgtcttcctcagagaatattcatccaaataagctgagaagagttttatattcgaatgctttagcaagtctgaaactgaaagctccgttccttgctgtttattgataaagttgatgatttctattgctatgattgaatctccgcccatttcataaaaatcggatgtaacatcgatcggattgattccaagggcatttccccaaatttgtcctgccattagctctgtttctgaataacagccgtcttccctgccactcagtcttattatttgaggcttgttgactgaagggttatctggtgcattgcttatcggtaatttttcaggcagtttcacccaatgtctctcccgcaaaaatgcgtaacccggcaagctgatttttcttcttttttctccttcatataacatttcccaatcgatctctgcacctttttcatagagcttgcttatatcaatcagaagactctcatctgttctcccgcctgcattataagccttaagtttttttccagcagcggtacttagatctctatcggtcttataagaaaatgcagcttcttcttgctgaaccggcgcttcgagcagactttcaagtttttccttcagatcttcgatgtcttttacgagaaaacacactctattctccagatgttttcttcccgtattcgctgtataacaaagatcagagagattcaaattgttttcttccgagataaaatgaagatactttgatgctatatcattcaggacggacttattttttgcagacagagtgaatacctcttttacctgtctctgttcagtctcacctattatttcaggtgcttcttccaatacaatatgacagttggttccgctgaagccaaacgaacttacaccggctcttcttggcgtctctcctttttcccaatttcttatcatgtcattcacataaacaggtgaattcgaaaaattaattaaaggattcggttcattaaagttgatacttggggggatgaccttctcttttaaagccatgcatgctttaatgagagacgccatgcctgatgccccgactgtatggccgatattgggtttgactgaacctataccgcaaaactgctttttatcggtatatttcttaaacgcattcgttatccctttgatctcaatggggtctcccaaaatcgtgcctgttccatgtgtttcaatataagaaatagtttccggactaatattcgcattcttccaggcacgtgaaatcaatttctcttgtgattcagcattaggagcagtgattccgttagaagccccgtcattattcgtagcgctccctttaatgacagcatatatgtggtctctgtcttctatagccctatgtaaaggttttaatacaatagcagaaatcccctcaccccatgcggtcccctttgcatttttatcaaaaatgctgattttagcgttttccgcttctatttcgctcatcgtacctatattttcaggtctcagaaataaattaacgcctcccgcaatagccatgctgcattcttcatttttaagtgcctcacaagcaagatgaaccgaaacgagtccggaagagcaggctgtatcaacaaccaagcttggccctttcagattaaaaatgtaggaggtcctgcttgccaatatgccgggataagtacctgtcattgcaatcatatccgcatcctttactagggaagcataggaaaacttcaagtcaccgctatgatcatgtccaacgaaaatacctgtattcgaaccttgtaacttgttccccgcataaccggagtcctcaatagcgtgataaactgtctccaaaaacaatctttgtttcggatccataagcatggcttctcttggcgaaattctgaaaaatgatgaatcaaacttatcaatttcatctaagaatcccgctctaaaataagaattctcattcgcactgggcagcaatggatcaatatctttccgccgcttctccggtaagtcccggatgcatgaggcacggttcataatgttttgccagtattcttttgcattattggcttttgagaaacggcaggatatgccgataatggcaatatcaaattgatttttcttggacttatcagataatccttttaaaatgcgcaaagccatttccctgtccattttttgctcttttacttgctccaatacatattgttttataatcgaaatatcatccacgattaatcacccctatcgattttgattctatataaaatatgagaagcatcatggatatatagaatagctgcttcaattgaagcagcttattgaattagttaatttttgtctcaaaaacctttccatcttctttacataacacctgcaccagatttctggcctgtaagacaacactcggaagacctcctcccacttgactccaatgcccaaccatataaaagtctttaagtccgggaagtgaacgtttcagttttttctcgtgcatgatgccttccatctgtttttcccagccctgccagcttccatttctattatttgtgtatcttctgatcgtatatggggtggatacatcagtcacgtcaatatttgatttaatttcaccaaaccatttgtctaattcatcaatcattacattcgcaattgcttttttctcttcttcatatttttcgcggttgtttttttgcaaagtctcccagtattcagcagaagttttcgcatacacgataatactcgttttgccatcaggcgcgaatgaaggattttcgttatatattttcacaaatatgtttttaacgttgtcacagccataggcgttaagaggctgttctaattccagactcaaataatgaggatatttttcaaacgtttttgatacgcccaatccgacataaatttgcggtgcacttgttttaaggttgtcataacaaaatgtcagttcatcatctgtatattttccatccagcatttcaaaaatagttttatagccatccgctgctgaaatgacgatatctccataatgacactgtccgtttttcagctctattccgatcgctttatcattttctactaaaaccttagaaacaggtgatttatattgaatctcaccgcctaattcaacatatctggcttcaataatttttgcgaattgcagagaaccttctacaggatgtcctgaagatttgctattagcccagcctaaagtagccataaagtaagatataggggtatctacattaaaccaaaacagacgatttacattttctcttacaaaactgcttttaaagcgctgggcgaattctttgatcgtcacttttccccattgccccattactttcatgtaagggccagcctttgctttgaaggcctcaaagtctgctaaatcgaacagttcgggcgctttatccaaatccagctctacatcagaaacaactcgaatgccatcagttaaaagcttaattgtttccgcatcttcaggtgcaactcttaaaaactcctgttctaatttatctacatcagcatacagcgtaaatgtatcaccatttctaaagttaacaaccgcaaattcttcatcattaatgaattccatattttgtattacattcagttctttccaaaatttatggaaggtattgttaggtcctgaaccgaccagccagctgatacaaccgtcaaaaaagtacccttttctcttccagccggtacataaaccacccggcagcaagcccatttcaaaaattttcgtgctgtatccgttcatttgcaagtaacagcccgcggccattcctgcaataccgcctccgattatgattgcagtcttgttttcttctgtattcttcattaattttccccttttccgaaactagttttctagaattttcaatccttcttgtatattgattttgccgttctccaggtcgtcaaatagattgttgagttcttgctcaagccgattttcagcagtatcttcttccgtttcttgctgatgatctttattcagctgcttgtcaatatactctgatagctccactacagaggaatatgtaaatatatcggatatatccacaatgtcaggatattgttgatttatcagttttaacagttgggttgccataatagaatcgccgcccatggcactaaagctttcatataaatccagctcttgcatatccaaaaccatagagtacatttgcgcaatacttttttcggtatcagagtaaagttctccctttcctttcagcactatatcttcagtatctgttcttcgacgtttttctgcttcgttttttgtcctgtttttatctattaatttgtttttgatttgctcagataattcaaaagacaattcatccttcgcaaaagcgaggagcttcatatttaatgtacctggaatgatattagtaagcttattcgatgctatttcttctaaaacggaaatagccctttctaccgtcaataatctgaaaatagagctctcatcagtaattccataatcgacagctatgccgacctcatcccaagccggccagttaattgacagcgtgtttttcccctgtttgttttgcatataagcaaaggaatctaaataagcatttgcagctgtataatctccctgtccggcacctccgaaaatagaattaattgaggagaacaaaatcgtgaaatctaaatctacgtctctcgttaaatgattgataacccatgttccattaattttaggagcgagcacttctttaaaaatattagcttcttttctaaagaggaaaccgtccccggcaactccggcacaatggaaaacgccattgatcgtaccgtatttctgttttatttcttcaattaccggctccatgctgtttaagtcagaaacttcacagctgtagcaatcaactttagaacccattgactcgatagctctgatggacttcagttttctgcaaagctttaaatccgttccatcagcaatgatatcgtcccatcggctttgatcaggcagtttagagcgattgagcaatacagcattgacgttatgttttccagccaggtgctttgcgatctccaaaccgattccgccggtgccgccggtaatcatatagacaccgttttctttaatctccataccgccgtgtttcttatcctttatcggttcaaccgtatccaaccgactgatataccgcttaccatccctaaaggcgacttgatagtgtttcccttttgttcttaactcctcactaataatttccggtgaagtatgttcatcaatatcaattgctttacatgaaacattttggaactcctgcgaaataacacgtcccagaccaaacaacgcggcgcccaatggattgattgtattttcttctccggacacttctgtcacaagatcagaaataagatgcaaattaatattgcttttcatcttattcttacttaatccccggactaagcggaacaggctgtatacgcctttattctgcatgtcttctaaatctgttaatgattccgttccttggcggctgatagaagacatatgtataatgctgctgatattttgatcgtttatgctatgcaataattgaacatagtcttcttctgatccgctaattaggaatttccgcccatttatcttctgaaattcatccccaaactccacttcaataacatcatcgtcatgaattttcaactgttccagtatagatttataaatttccatgttgtctttaaataacagtataggacctgttacctctgttttttcttcttcaaaagcttcttgcgccatccattttaattgataaagtgattcagaactttcttcaaaaagggcattaatccgatttactttttttaatacataatcggtgatttctgcaaaaacatttccttctgtatctattaactgaatatcacacagctttgtctctttactgcttgcgttctttttgacaaatgcataaaaatgctgcggcattcttgagtaaatcttcacgcttttatatgaaaaaggaaggaatgtactatcgtcatcatcttctccaataaacacgttcactgcattatctagcaaagcgggatgtaaaaagacgtcttttaaatctgctgtaaattcatcagccaattttaattcggccaattgttcatcagggcccagtatgacttctttgaagttcagccacctcggtccgaaagtaaagactttgctgattaaaccatttttattttcataattgacttttatcttctctctattactgtcattcctaacagagtctaaatcaaacattgatacagagtctgttaatggaaacgcttttccttctgcatgtgtaatccaggtttctccttcctgactggctattataaattgaatacattctttctttttcttaatgattgtgtgtacaatcttattctcatcctcatttactgttaacggagtgaagaagataatatctcgtaattctaattgattgcttttatagtaagcggcacttgctcttcttcccatttcgatataagtcgttcccggaataacgcaagcccccatgattttatggtcacttaaaacccaatccttattcacattaaatgtcgttgaatagatcgtctcattcattgaatcagccaaacactggtcaatcagcgggtgactgatatttttctgatgcggcgcttgacctcttctgtcttttacttctccccagcataatgttctttcaaattggtatgtcggaagactgacaatctttctgcgctcatccttgtacatttttgtccattctacttttgctcctctgacatacaggttgcaaatttccgtaaggtttagcagtaaatattcatccccttcagtaagaatgtcatgtatcaaattgtcagattgagcattcattttgcgatgttcagataaggaaatttctccttcatccataatctgttttctatcagaaccaactttatggaaagaaaaatatacgcctttttctgatatttcattcaggttatgccctgcaagcctgccgatttttctctttaattcttcgtaactttttacaatcagagccaatcggtagccgtaatggccccgccctgtgtttgctgtatagcaaatatgttttacgtttttttgagttccttttttaaagaattcattatattccttgatgagtttcattaaagaattctctgttttagctgataaagtaaatatctcaaatgtttcatttgcaggaatgacctcttcaacctcatctccagcatcttcaatcactacatgtgaattggtccccacaaagccgaaagaactgattcccgctctcctcggtgagttatttttaggccattcatgggctttgtctgtaacaaatacaggtgacttcacaaagttaatcaatgaattcggttctttaaaattaatactcggagggatgacttgatgcttcatagacagaacgatcttgataagtgacgccaaacccgaaacggcaacggtatggccaatattagatttaacagatccgatcccgcaaaactgcagcttgtccgtatattttgaaaacgcattggaaatcccctttatttcaattggatctccaagctttgtgcctgtaccgtgcgcttcgatatattgaatggtttcgggatcaatttgagcattttcccatgcctgaaccagtacttcttcctgggcgatggcatttggagctgtcaatccatttgaggccccgtcattattaactgcactccctttgataacagcataaatatgatctccgtcctgcttggctttacttaaaggttttaagatgactgcagctactccgtcactgaaaaatgtcccgtctgcgtctttatcaaatgagtgtactttatcacttactgattccatcattgattttttggacgttttgaagcgcggaaagaatcctaatgaaattccgctgacaatagacatatcgcattctttatttttcaaagcattacaggcaagatgcacaccaagcagccccgagctgcaagcagaatccaaaaccatagaacttccttttaaatttaataaataattaatccgccccgccatcaaacccggccagttgcccgtcatacttgtcgattctgattctgtaatgtagcggtacaacgtattattgacatggtcttttccaacaaagagcgatgtgttgcttccataaattttgtcccctgcataccctgcatcttcaatcgcagtccataccgtctccagcaatactctgtgagacgggtcaatggcctttgcttctttaggagaaatattaaaaaattcaggatcgaacttgtctacgtcttctaaatatccgccaggtttccagttatctgcttgttcttccgtcagatatcctgaaccgagaaaatcagtaaaccctttattgtttacgatcggtttaatgtaattgatcatatcttttggatattccgctttgcagtcttctccattcatcagattctgccagtattcatctgtattgtttgctttcggcagtctgcaggaaattccaatgatagcaatatcttcattgctgcttgcagcctttaattcttttagcattcgctttgcttctttctggcttagcttatgctgtttcacttgttcaaatatataagattgaacgctattcattacggatcactcccgctttctttctaagaaaatttttgataggaagggtaataagatctacatttttaccttaaaatggaattcagttcccgtaataatgtgataggataggcaggctgctttttcttcattcaattcgcagcctgccaatatccattttgcgaatatattcttacaggcccaattcagttattttcggtctggatgaaatatttgatttgcttcgctgacttccatctctccggatgccagcttattcaaaattgcatccaggtcatcttcattgtcttcttcagggattcggtcagaagacttctgatcactgaagtgggattcaaggtaggttgacatctccttaatggagggatacgtaaaaatatcagaaacatcaatgagagaaggccattctttctctatttcttttaccagatatatcgcggatattgaatctccgcccaaatcataaaatttatcagttatactgatttgttctaagcctaaaacttttatccaagctttcattagtttattttcaatatcgctgaagctaaatgtctgatcggttttcgactcaacagatttttttacaatcgcctgctccttaaaagtcaaaatatccggagataatcggaaatgaatttgatcttgatttaattccagtacccgatgatcaatttccccgatgatcacattccggatgtccttttgcatgacttcatcgaaggcacgtatcgcttcagctgaggtaatcgtcttaaagccgttttcatctttatgttcgtttccggccttttgacgctcttcaatatattcggcaagcatgcccacatccgaccagccgcaccaattaatcgtaactgttttttcatccggtcttcttcgctgtctgcgttctgcaaaggaatccaggtaggcattagccgcagtataatcagcctgccccatactccccgcaagtgctgtgatagaagaaaacattatgaagaaatccagatgctcatgctttgtcagctcgtttaatatccatgttccattaactttcggtctgagcacgttatcaaacacttttttttcctttctgaaaataaacccatctccagaaacaccagcactatgtatgacaccgtggattgtattgtatttactctttatttcctcgaatacatgaatcatttcactttcatttgcgacatccgccttatagtaatctaccttagaaccgctttcttttatttcttttagagcatcgattttcttgttgtttcccttctccatgttgatctgctgctcggagcgtccaatgaggattaattggacattttcttttgatgataaatacttggccatttctaatcccagtccgcccataccgccggtaataacatatacaccgttctttctgatgcttattttcccttcccgaattacggataagtcttcagtctggagctcttgaacgtatttatgccggtctctgtaagcgacaagctctgactgtttttttgagttgatttcaaacaagatgctttccgccataagattttgatccaaatctatgcatctgacacttacacgcgaatattccttttcaattacttttccaaaaccgaaaaatgccgcgttatgcgggttaatgtctggttcttcaccgcttacttgatgtgcaaggtctgcaaacagcatcagttctatgttattttttgtattttctacaagtgattttgttaaataaaataaactgtctacccctgaggatatttttttctgaagctgatatatgtttttgtctttctcattgctgatagacatcaaatggacaatctgagaaaccttttcactttgaagagcttttacaagacagtcataatcttcttgagaatcactgacagtataatgatggcttccgattttagagaaatagtcaccctgttccgcgacaatcacagttttcccttccagttctaaccttcgaatgatttcctcggataaactgcagccattattcttaaataataaaataggatgatgaatttctcgcatctcgtgtgattgatcgctttctcttatccaagatagcttatgatatatattgtttcttttagtcttttcagctgctttatgcaccctttttacgatgtaattgttgatttcaccgaaaacttctccagtgtcattcagcaggacgatgcgaaacgttcctgtttccccgttgcttcggctctttttcttgatataactgtaaaactttttagaagcagagccataaatcttaaattctttataaaaataagggagataggtttcgttatctattgtgaatgtcccggcattaacggcacaatccatcatcgcaggatgaagcgaaaactgaacgaaatcactctcatattctttcggcaattccaattcacatagaagcctgtcgtcgtctctgtagattgcgttggtgcatttccatctgcctccgacttgaacgatgctttccggtctattggtatcttctatatgataaaccgacttgtattcatcggtgtttatttccgtcaatggatgattattacgttgaatgacataaacagaattaaagcttttctttaaatcctcaatgtcatatgtttcccgtaccggttcttctttcgcaatgaccgcttccgcgtgttttatccatttatcgccggtcttacttatcacactaaactctaaaacgctgtcctttttctttatgatcgtatgaacttctttaacttcatttgcttttacctttaactgatttgaaaacgtaacgtcttttaacagaatgccgacaggttcgccgaagtattttcttcccgcttctctagctgtttctatataaaccgttccagggataacgtaagaatcattcactttatgttcatttaaaaaccaataatcagtgacattcaaatgggatatatacacttccagattcagtgactgcactgcaagattgctcaataaagattgttttttctcatcggctgaagggccgtctgcagccagctcagcccataatctttttccgctgaatttgtatgtcggcaagctgaccttttgaaaattcatctcgctataaagatcttcaaagttaatattcgccccatcacaatacatttcacataaaatatgtaagtcagaggttggaatattagagacgtcttgtctgactctttgaatcacattttttattgtttgagtattctgcacactgtctgtatgcgtttttcctataaactttgtttgatttgttatcgattgaaagtatatatttttctcccgatacgttttccattcagagcatgataaaaactccagcttttccagcagttccgcgacagagcttattaccatagcgagtctgtatttgtttggcaatctcccagtgtttgctgtataacatatatctcccagattcacatctgtttctctctttaaataatcaatatgatctgtaagcaagtgcgcgagagatgttttagtcctagctgatacagtaaaaatatgttcagataaaacggattgatcgactttttcaactgcgggtgcctcttctaaaatgacatgacagtttgtaccgctcagcccaaaactgctgatgccgcacctgtatactccgctgctctcccatgctgaaacggagtcattgacgtaaacaggcgattcatgaaaattgatatttcggttcggcactttaaaatgtaaacttggcggaatttttttatgctttaatgccattaccgctttaattaaacccgctattcccgccaaactatcaagatgcccgatgtttgttttgactgaagatactgcacagaactgttttcggtctgtatattttctgaaagcccgttgtaacgcatttatttcaatcggatcccctaatttggtccctgtcccatgagcttcaatatatgtaattgttttaggatctatttttgcatttttccacgcatctactattacttgttcttgagctgctgcgttaggagcggtaattcctactgagctgccgtcctgattaacagcgctccccttaatgactgcatagatctggtcatgatcacgaatcgcttgggccagcggcttcagcaatacggcagcgactccttcgccgctattcgtgccgtcagcagaatcatcgaaagtccttacagcaaaatcagatgaagaattcccgatatttaacctgctctcctctattgtctttgggaatacttttatattcactccgccggctaatgccatatcgcaatccttatttcttattgcctgacaagccgtatggagggcgacaagcgatgaagagcatgcagtatcgattaccattgctggccctttaaaatccaagatatatgacagtctgcttgcgataactgatttaatgttacccgcggtagccagtccgagtaatgattgatctcctttttcaagcaatctgaagtattcatttgagccgtcactgctgagtccaatgtatactcccgtatttgtcccacataattttccgccgccgtaacccccgtcttccaatgcgttccaggccgtttcaataaataatctttgtctgggatcaatcaactttgcttcatttggaaggatactgaaaaagtcacaatcaaatttatcaatctcatccatataggctatttttgtataggctgcatctttactgtacttggttccgctgttttttaatgactggtcagcatctttttttctgttcagaggaatgtctctgatgaactcttttccttgtaaaagtaaatcccaatattcatttacgtgattggcttcgccgattctgcatgataaaccgacaatggcaatgtcatctccggaaatgtctttggtcccttcctcgtttttttgtttctttacattaggagtttgatttgtaaaagcggccgcttttaagttacttaaacttataaagtctgttttcatttttttacctcgctgagaatcactagataggtgatcatacctgtcaaacttcaaagtcttcaaagtgtttttttgtgtttgtttcagaaaataattgattaaatctttttttctgttcatttataggggttttttttgttcgaaacactgacttcagcatttctactgccatatgcatttgttctcttgacggctgacgacctgatgtttcaagttcagcctgtatggcagctactttttcatatggttcgattacacctttggcgtattcctcattgttccagttgtaatttttagtagcaaccgcgatccctaaacttctcgagataatagaaaaaccggcttgcagtgaaacagattcgttcaaaagagtctcttttataatcttcacgtcctcttctttgtcgtagctgtacgatttgatgtcagcgatattgtttcttacaagattccttaatacagatttcggcccaaattcaatcacagtatcagtatgatttgcttctaaatacttcatgattcccatccaatttaccggttttacgatttgagttcccagtatgtcagccatttgctgtttatctgaatatggaagagccgtcacattagataaaactttgtattttggagttctgagatcatacttttttaactcatggctgaatttttccgcagcaaaacccatgatcggagaatgaaaagcagcacttacatttaatttaaaaatgtctgctcctctggctttaagagtttcactaagctcttcaactgctgccgcttctccggataccacaacatctttatatccattgtagttagaaacagcaatcgtttttcctcttgaagagagagattcgcactcttcttctgctattctttcatccaggttcctgataacagccattgctccggtcccttgttcggcagcttctttcattaataatcctctggctctcaccagctttacagcgtcctggaaatccaaaacgtcactgcaaaccaaggcagaatattctcctaaactatggccggcgatatattcaggttcttttccgacctcttccatgtagattctgaattgtgcaatacttgttgccaggatggccggctgagtattttctgtttgagatagctcagcggcacttccatctatacataatttcttcaggtcaaatcccaatgcatcactggcttcgtcatacgtttttttagcgataataaaattgtcacataaacgtttgcccattcctgcatattgagatccttgtcctgaaaataaaaaacctattttcgacatttaaatacctccaaagtccctataatgcctgatttgccttacattctgccgatcagcaaaatgtaaggcagaaccggccgctttatattgaattgtctgctttgtctgctgtaatcacttgaatcaaattcatgtagttataaaataaatctttcattttgtgctcatttagtttctgatggttatatataaaaacgatttctgcttcggatggcttttcatgaactgcaaaaaccagatcatataattctgagtactctttttttgattcattactaatataaaaaagaggaaaaacatcttgggccgaacttgatttcttatagtgagtattcaaatcgtattgtgaatcctcttgattctcaatctgctccttcgccatacgaataatatcgtgaaaattctcgatatcagacagatcaaaagacagctgactcatccgatcatctccatgacccgaaaattggatatgaaccaagttttgctggctgacatcagctaataaaaatacataacccgctaataaaacatgagaaatatcatatttgtaggtattgcatattgtttttaaaccatcataataattcgcatttaccgcatattcgtgcatggctgtatgactttgtccagttgattccgagatgtattcaagcggtaaagtaataggaatgatttctttttccaaggacactgctatctccgcaaaggctatagctgattctatatattcggacaatctgtaaatagtcggatatgcaaacaagtcagcaatttgaatttgttttggatacagcttctgaagctcattataaactgcaacgattttgattgaattaccgcctgcttcaaagaagttatcatgtattccaggctcttctatttttaaaacatcggtccaaacacggctgatacttttttgtacatccgttaccgcttcctcaaaaggccggtcaaaacctgttctatctataacaggttcaggcagtgccaggacatttatttttccgtttgctgtcagcggaatttggtcaattttcataaagatctgcggaatcatatactcaggaagcacaggtgataataacttaataaattctgaaggatatacagtgctttctgccacataatacagaactaaatcttggactcctgcggaatttgtttttccggcagctacacattccttaactttttcatgttggtttactatgctttcaatctctcccaattctatccgataccctctgatctttacctgattgtccattcttccgataacgtccagttcaccatttggcagccaccttgctaaatctcctgtcttatacatcttggttcctttaacaaacggattgtctacaaacttttgcgcagtcaaatcttcttttcctaaatatcctctggccattccggctccagcaatgcataattcgccagtactgccgagcggtacagtgtttccatcatgatctactatatatatctgtgtattcgcaatcggcttgcctatatttacactattttcattggttaagtctttcacagaagaccaaatcgtcgtctcagtcggaccgtacatattatagatcttcagatttttatatttttttagctcaaataacaattcccgttgaaatacctcgcccccaaccatgatggtcttcaatttctgaagactctccgtactgttttctgcacttagcatcagctttaatctggatggcgtaagctgaatagtattgacatcagtctcaacaacgatcttgtttaacaagtacggatctctttgttccgcttcaccggctatgacaactttcagcccttgagttaaaggcagcagcgactctaatccgaatatgtcaaatgagcacgtggtgaccgaaagaaggacattgtcttgtgaaaagctgatcctgtctgttattcccttaataaagttatgaacggcacggtgctctacggcgacccctttcggttttccggttgatcccgacgtataaatgacatatgctaaatcttcggccctgttaataacatcaatgttcgtctccaactgatgtaataaatcctctgaatctatgttaaatatggttccgctgtacgttaattcatttggaagtccttcttcagttaacagcaggccgcttttactgtctttcagcatataattgatcctgtctgccggataatcaggatcaagcggtaagtagcatccccctgcctttagtattcctaatattcctataatcaatcggaaagaccttcttaccaaaataggaaccacaacattctctttgatgccgttttccctgagggctcttgccaattgatttgccttattattcagctccttataggtcaagaagtctccgttccattccagagcgattgcatcaggtgtccttaaagcttgctcttcgaagagctcttgtaacgtcttttctttcttatatgataattccgtgcagttgaattctttcaccagcttttgtttctctgtctcatttaccatatcgatctgagaaactattacttcatgatcagccgctgcctgctgtaagatgctaaccaggttatctaagattgaacttaccgtttctttactgtaaacactggcgttatatgtgattttcatatgcaagtcgtcaccgggagcaattaaaagctctaaatcatagttggtttgttcaaacccatgttcagcagttatttttacactcgaacgggctgaatcttggaaaagatcctcactcaacgggtaattttcatacacgactacgtgattgattaatttattcttcatacttgtcaaagactgtatgtctgccagagaacaataactgtattcgttcgcttcaataaagtctttatttatttgtttagccaatgaaataaatgatgtatcacattctcttttcactctgattggcactgcatttataaataagccgaccatattttcaattccgtttatctcactcggtctgcctgaaacaatggaaccaaataccacatcatttgtattgttatatttctgaagcaatatcccccatgctgtttgaacgatagaatttaatgtaatgctgtttgactcagcgatttttttcagcttagcggcggtttcaccgttaagcgctcccagtttttgatcatgctgatactcgtcagatttcaattccagttccggaaatgagatctcttgttcatatgcagaaagatattccttccaatattcaaatgcacggtccttgtcctgctgatcaagccattcaagataacgactgtacggtacaggtgattcttgaaggagttttttcccttcagccacgtcaccatatagatccataagctcttttaacaggataccgacactccagccatccaaaataatgtggtggaaactgtatatgactttaaatttatttcttcccagcttgatcaccgatactctgatcagacaatctttgttcagatcaaacggagtattcctgtctctcaccttgaattgccctacaaaggcatccttcttctgctcctcccattggctgatatcatgatattgaatgtttagttttctttcttttaaaatggcttgtttaaatacacggaaaccgttatagaaaaatgacgttcttaatatttcatatttagcaatcagcctgtttaatgcgtcactgagaacttctgtattcagatttccttcaactgttatttcactttgttcgaaataagcgctagattgatggtcaatcacagcgttatacagcatgccttcctgcatcggtgaaagagaatgaattttttctacttcagcaccgcttgcaagaatttgatttagctcctctatttgaagatcgggatccccataatcccatggagttttctcagatattttcttattcacacaatgttctatgatctgatttattttcaattgataggctttcgtaaattgctcaatcgtctctcgtttatattggtttgcactgtaattgaacgtaaacatcagcctgccatccatgatatatccatttatttctatactatgtgtctttttatttcttccagatatgctcgttccggcggacaaaggtgatatttgaaataggttgctgcgatcttcttggccaaattcacccaagtagttaaaactgatatcaggttttaattgaagatgaaccgagtccgacaaatatctgagtattccgtaaccaatcccgttatgggggatatgtctaagcatttcctttgtatacttaatggagcttgataaactattactttccgtcatatcgagaacaattgggtatattgtcgtaaaccaacctattgtgcgatggaccggggtttttataacactttcacggccgtgcccttcaagattcacaaggatcttctcgttgccggtccattctttggctgcaagtcccagtgagcaaagcaatatatcattaatttgtgtatgatatgctgcatttgtatttcttaaaagtgtttttgtttgatcctctgttaattcaattttaatttctttactatcttcataagagcagctttcggcaatgaaatcctttggaagaggttcaataatagccgtttctatggtctcccagtacccagcttccttttgaagagccttgctgtttgcatattctttcaattgacgcgcccattctttgaacgatgctgttttagtttccagctccaccttgttcccattaactgtttgaagataagctgtttcaaaatcttccaataggattctccaagatactccgtcaatgatcatatgatgaatggttaatagaagatgatctccgtttttggttttaaataccgccagttttattaaaatccccttttccaagctcaattcgttctgcatacggtcagccagtgattcaattgccatggctggatcttctgtttgtgtcatatcaaatacttctaaagtaaatgtttcttttgcctgtttaatgcccctattccattgcttaatttcaccgttttcctttttaaactgcatcctgagggcatcatgatgcctcaccagttccaaaaaggccgtttcgattgctttttcttctatgccggactttttgtaaagcataaaggcttggttatagtggttttcttgttcaaatctctgttctataaaccatttttgaatcggtgtcagatcaacgtctccttctacaatcgactgatctgcttgtatatcagctgattttacgtgagcactcaagtcttttatgtgcggatatttcattaaatctctgacttccagttttaagccgtatttttggagttcggaaactactaaaattgatttaattgagtctccgccgatctcgtaatagttatagttaatcccgattgatttcatccccagaactttctcccatacgcatgcgagaatttgttcctttttatttcgcggtgcttcatatgcagactccaatacatccgcaatatctataatcggcaatgatttcgtatctatttttccgtttgaacttaacggcattttttcaatctggaagatataacttggcaccatatataacggtaattctttagacagattttcttttaaagcataaacatctatttttttgtcggaagtaacataaccgcagagatatttatccccatgttggtcatctctcgctacaacaacagcctctcttatgtgactcattttcagaagccggttttctatttctcccgtttcaatacgatatcctctgattttgacttgatcatcaattcttcctaaataatcaattgtcccgtccggcatccattttgccatatcccctgttctgtataacttagccccgggttcaaaggggttatctacaaatttttctgacgttaagcccgctttatttttatatccgtctgcaagtccttctccgctgacacaaagttccccggctgcccctaaaggaagtaattccaattgttttcctaatatataaagcttagtattatccgcaggtttgcctattgatactgcattgccattgtctctttcaatatgatattgatgaatcatacacccgactgtagcctctgtcgggccgtattcattgtagattttgacatgaccgttaaatgcaccgtgtatcttttttgcaagcccggttttcagctcttccccgccgacgattattttttttatctttgacgtacttaaatctacattctccagcaatctcaaatgcgtcggcgttagcttaataatatccgctttattttcttctataattcttctgatcagaagagccttgtccggtccctcataaataataattttatttcctgaaataagcggtgtataaattgaagtaaccgttaagtcaaaagaaatagaagaatacagaggaaaatcaatatcttcatcatttacatatatcttatttgcccaatgaatataatttaccacgcctttatgttttaccatgacgcccttcggcagccctgtagtccctgaagtataaatcatgtaggcaaggtcttccgggcaactgacattcggcagattacttctgttatgcatatatagagtaggatcacttaatgataaaatttctttattgaatgtaataccacctgacaatccgttttgaattaggagaatgtttgcatcactgtctttcagcatgtaatttactctttcatcaggatattcaggatctatcggcaaatacgctccccctgctttcagcaccccgataattccgatgatcatctcaagagatctctctgtcatgattccgacaatgctgttttctctaattcctttttgtctcaaaagattagccaggctgtttgatttctcgtttagttctttataggttaatagcgtatcttcttggacagccgcaatacgttcaggtgttttttctgcctgctcttcaaataattgatgaatcgttttattccgaggaaattcagctgccgtgtcattgaatatatggagcaatgtgtgcttctcctgttcaggaatcaaatccagtttcattaaaggttgatctaggccggcagctgcactttgtaaaagcttcgtaaaatgggcacccattctctcggctgtttctttttcaaataattgactggagtattccaagtggaacttaattcctttatcaatttccgtcgcggttaacgttaaatcgaattttgaaatattgatctcggtttgaatatgctcttccggatttggatccaagtgattttcaataccgtaatctgcattttcaagtacaaacatgacatcaaacagcgggttccggctcgaatctctttttaccccgagtttttgaacaatattttcaaattggtaatctgtattctcaaaatcttttaacgtatgatgtttgacctcttctaaaaacgctctgaatgttttatgttcctcaggaaaatttcttatggcgacggtattgacgaacatccccaccgtattctccagttcggtgtctgaccttccggactctgccgttccgatgatcacatcctgctgaccgctgtattttgaaagcatgatattatataccgccagcagcaccatgtacaaagttgttcctgtttctttcgccaccgactttaagcttgatgttaacctttcatcggccgtaaagctgactcggcttccttcaaagcttttgactctcggccgctcgtaatcagtctgcagattgagaatcggcagatctccgcttaaccgcttaagccaatactcctcttgttcctttaacgcctcttttgttcctgagcttacttgccattctgaataatctttatattgcagcggcggctgttttagtttatgacccgcatacagcgcattgaattctttgcggattattccaaccgatacaccgtccgcagcgatatgatgaacatctaacagcagcagattccggtcttcatacgttatgagtccggctctgattaacggtgctttgtccaaatgaaagggtctgataaactgcttcacatatggtcgtatcccatcagacggcagcttctgataattaaattcgagctcccatgtatcgtgaataatctgaaccacatcgccgcttacaacatcgaaacttgtccgtaacgcttcgtgtctgccaataatctcttgtagaactgattcggcttttttcacatctaattttccgtttagttcaatcataatcggcaagttataaacgatactgtctttatccgtctcccaaagggcaaacattcttttctgagcagatgacgcttgataagaagactgctttctcgctttactgatgaccggataattctgtttatcccgcttttgaataagacggctcaactgtttgatggtaggctgctcaaaaagctccttcacctttatatccgtgccgaatgtttttctgatgcgggaaatagtgaacgcagctgttaaagaatgtccgcccagttcgaagaaatcttcatttatactgatccgtttatgcccaagcatttctttccaaatttcagctagtttttcttccgtttcatttgccggagcttcgtattgaggtactgacaaccgttgcaagtcaggaagaggcagctcttttcgattgatttttccgttagctgtaagaggcaactctttcagttgtattatgaaactcggaatcatatacttcggaagaacctgtgccaatttctcctgtacgaacgagccttccatctcaatgtccccagtaatatatgcagaaagatatttctcctctatataaacaaccgccgcttcttttataccttccagctgtaatagttggttttcgatctctccgatttcaactctaaaacccctaattttgatctggttgtcaatccggcctaaaaattctatatttccatccggcatccatctgccaaggtctcctgttttgtacatttttgctccacgatgaaaaggattatcaataaatttttcattcgttaattcttcattattgacatatcccgatgctaaacctaccccgctgatacaaatctcaccaggtgctcccacagggaccagttgatctgaacgatccacaatatagatattaataccgtgaattggtcttcctattctattgtatatttcacagttttgaatatgatctagatcaatgctatgtgcaatacagccaacagtgctttcggtcggcccgtaatggttaataaacttcatccatctgcatttttcagcgagctttttgacgttgccgatgtttatgctttcgccgcccagtataataacttttaaatcaggacaagacgccagcatgtcaacatcctccatcaatgttgaaaataaagtgggtgtcattttaagatatgtaatactatttttatgaatatattctattaatgatagagagtgaagatacacttctttatcaacaaagtggacttgtccgccaccggataaaactggaaatatactggtatagcataagtcaaaactatattttgacgtcactaacgacctgctgtcagaatttatgtttatttgatcacatacccataatgaataattaactaatgatttatttttcaccttcacccccttcggttttcccgaagtacccgaggtatatataacatatacctcgtcctcgagatcatactgaacatcagggtttgatgtattttggctggtataaatcgatttatccgtaatatccaaacattccgccgcaatgtttttatcagctaaaaagcacaaatctgtaatgaggatatcagctttgctatcttttaaaatatgatttatccgactgaccggtgattcatcatcaataggcagaaacgcacttccggtttttaaaattcccagcatcccaatcattgaatattctgaaggacggatcatcatagccgtaatgctgttttttcctgcccctttttccattaataatgttgcaacttgatttgccttttcgtttagctctttataagtgatatgctttcctgcatagacagccgctgtttggccaggtgtcttttccgctcgttcttcaaaaaggtcttgtatcgttttattcaccgtataattagaggactgcttattaaaatcctggagcattccgcgctcttcttcatttacagcgctgatgtctttcaggacacgcgtaggatcagttgccacttgctttaacacatgacagaaattaacacctatacgattaatgatatcttcacgataaacattattgttatacgtcatctctgctttgatttggctgcctggaataataaccagcccaaagtcatagttcgtctgttcaaacacttccatatctgtaatccttaaagcatcagttgtattatcgaccgccttgccatagtcatcaacaggataattttcataaaccaacatatggttgatcagtttctctttcatctttgtaagagcttgtatatccgctaaagaactgtaaccgtatgatgtattcgctttgataaagtcactgttcagcttttgggctaatgctataaataccgtatcaccatcgccttttactctcagaggaaccgcattgataaataaccccaccattttttctatgccttgcactctgcattgtcttccggaaataaccgcaccaaaaacaacatcatccacgttgttatacttctgcaaaagaactccccatgcagtctgaatcaatgcacttaaagtaatgtgatattgatcagctgcagctttcaacatcgaagtacatgtttcatcaataatgaatgttttcttcctattattgaaaccgccctcatcagcagaactttggaataccggcttgctgctcatattcatttagataatccccccaatattctaatgcggcacttttgtcctgattatccagccattctaagtaggtgctgtaaggctcggtatgctgaagcactgtctctcttccttcttttaatgacgtataaatagtttttatatcattcattattaaactcatacaccagccatccataataatatggtgaaaactgaacagcagtttatattctttctcatcagtttttaatacggttactcttattaagcaatcattcgtcaaatcgaatctcgttcccctgtctttaaactggacatttttaagccggactttcttttgatattccgagaaagtgctgatatcttcaaattcaattttaacttttctctctcttagaacagcctgtttaaacttacttaatccttcatgaaaaaagcatgttcttaaaatttcatacttctcgatcagcatattaaaagctgtatttaatctgccaatatcaagctgaccggataaagaaaatgtaagctgctcaaaataggcttgtgaaaacggatcaagcaatgcatgataaagcatcccgctctgcataggagtcagggagtggattttctctatctcttttccgcttgataaaatctgctccaaatctccgatggataaatccagatctccatagtcaaagggtgttttttcaggaatttttttcattccgcaatgctgaataatatcgattaaccggtttatataggattcggttaatgttttaattgtttcttctttaaactctttcgtactatagttaaattccaactgcagttgaccgtccataataaagctgttgatttcgatggcattcaattttttattagataaagaaacacttgtaccagatgatatatctgcatgctgaaaaacagcccgctttttttgagagatttctcccagatagttaaacccgatctcaggctttatcgtaaaactgatgtcttttttatgtgccggtgccgtcaagtatttaataattccgtaaccaatacctttatgaggtattcttcttaaatactctttcgtattttttatgcaataaggcagatcatcactgtgctccatatccagcacgatcggaaatagtgaggtgaaccagccgatggttctttctattgaaatattttctaatatgttctctcttccgtggccttccagaccgattaaaaccttgtcaagtcccgcccattcttttactgccattcccagtgaacaaagcaagatgtcattaatctgtgtgttataagctgcatttgtattcctctggagcttatcagttaactgctttgtaagactgacagtaatggtgcggctttccttaaatacactgtcagttttattgaaatctctcggaatttctttaatcttcgttttctcgatattctcccaataccgaagttcctttcttatctcacttccgtttgcatattccgccaatttacgtgtccattcttgaaaggatgccgtttttggcggaagaacggccggctctcctttttgcagattgttgtagacctgctccatatcttcaagcagaattctccaagagactccgtcaatcaccatatgatgtatagcaataagtagataatcgcccctcattgttcgaaataaaccaagtttcattaaaagtcctttttcaagatccattccgctttgtaactgatcggcaagtttttctattgtatttttgtaatccgtatcagcaagcagatcatatatgtccagagtaaaagtatcccgggcggcttggacatctctgacttcttgttttatttcgtcattttcggctgtatatatcaacctcaaagcatcatgatgctttactaataattcaaatgtctttgccagagcgtgttcattaattttttctttcacttgaaacatgaatgcctgattaaagtggtgaatgtccgcaaagtcattctctataaaccacttttgtatcggtgccagttcagttctcccgctaaccgggctctgatctgtttgagctttatataatttcacgtgtttactgaggttttttatttgcggatactgcaaaagatcttttacctctagactgagactgtatttttgaagctttgatacaatcagtatagattttattgagtctccgcccagctcatagtaattatcattaataccaatatcatcaattttcagaacttccgaccaaacatttaccagaatctgttcgacttcggaacggggtgcttcaaggtgctcctttatatgtttaggctcttctatttctgcaagtgctttcctgtcaattttcccatttggtgtgagaggcagctgttcaacctggatgatgacaccgggaatcatatattgcggcaaaatgtcacccaattgctccctcaaagctgctccggatattttatattctgcggttacaaatgcagaaaggtatttgtcaccgtgaaggtcgcacttatctataacaactgcttcttttatcccgcttattttcagaagctggctttctatttcatcagtttcaatccggaagcctctgattttgacttgattatcaattctccccaaaaattctatgtttccgtcaggaagccaccttgccaagtctcctgttcggtacattttagttccggactcaaatggatgatcaataaacttctcacgcgtcattttctctttattgagatatcctcttgctaagctgtcacccgacacacacaattctcccgctaaaccaataggcacaagattgttgttgtgatcaattatgaaggctttcagatttctgatcggcttaccgataggaatggtctttgccatcgccctctcagcttctgagtatctccacattgtagagcagattgtcgtttcagttggaccgtaggcattaatatagtctattttattcacgatccggttcaaggattttgtagatatctgagaaccagcagtaattaagagccttaaagctgataatccgtttatatttatatggttgatgtatacaggcggcaaagtggctacagtaatgtcatgccggttaatatactcttcaaataatgtataattattgatgacttgacttgaaaggatgtgtagttccgctccggtcaacagtgccatactgatttcccacactgatgcatcaaatgaaaaacttgcaaattgaataattttatcccggtaattgatattcatatcatgttcaaagacacttttgagattactgattccgatatgccggatcgttacaccctttggttttccagtcgttccagaagtataaatgacataagcaagatgttctgcggaactcatcattggcaggttatgccgatctccggtgtaaagagaactatctgttaaatcaataaccttcccgtcaaacggaatattgtcagcctgactattctgcactaataaaatgtcagaaccgctgtcttcaatcatgtatttgattctctcagaaggatatcccggatcaattggcaaaaatgcgcctcccgccttcagcacacccaatatgcctaacaccatctctaatgatttgtcagcaacaatacctactattgactcttttttcacccccattttcattagtattctcgccagactatttgatctttcgttaagttctttataagttactttattattttcatacactgccgctattctttccggtgtcttttccgcttgttcttcaaacaattgatggattgtcttattatgcgggaagtcggctgctgtatcattgaatacataaagcagtttatgtttctcatcatccgttatcatattcagtctgcagattgccgtgtccggttctgatacaacctgttgtaaaagccgggtataatgagcacccattctttcgactgtgtctttcctgaataaatgattgcaatattccaattggaagttaacgccttcatcggtttccattgcagttaacgttaaatcaaatcttgatatattgacctcagataccagtaaatttgattctgctgtctcttcatttcctccgaatccgtaatccttactctcaaaagtaaacatgacatcaaacagcgggttccggctcgaatctctttttaccccgagtttttgaacaatattttcaaattggtaatctgtattctcaaaatcttttaacgtatgatgtttgacctcttctaaaaacgctctgaatgttttatgttcctcaggaaaatttcttatggcgacggtattgacgaacatccccaccgtattctccagttcggtgtctgaccttccggactctgccgttccgatgatcacatcctgctgaccgctgtattttgaaagcatgatattatataccgccagcagcaccatgtacaaagttgttcctgtttctttcgccaccgactttaagcttgatgttaacctttcatcggccgtaaagctgactcggcttccttcaaagcttttgactctcggccgctcgtaatcagtctgcagattgagaatcggcagatctccgcttaaccgcttaagccaatactcctcttgttcctttaacgcctcttttgttcctgagcttacttgccattctgaataatctttatattgcagcggcggctgttttagtttatgatccgcatacagcgcattgaattctttgcggattattccaaccgatacaccgtccgcagcgatatgatgaacatctaacagcagcagattccggtcttcatacgttatgagtccggctctgattaacggtgctttgtccaaatgaaagggtctgataaactgcttcacatatggtcgtatcccatcagacggcagcttctgataatcaaattcgagctcccatgtatcgtgaataatctgaaccacatcgccgtttacaacatcgaaacttgtccgtaaagcttcgtgtctgccaataatctcttgtagaactgattcggctttttttacatctaattttccgtttagttcaatcataatcggcaagttataaacgatactgtctttatccgtctcccaaagggcaaacattcttttctgagcagatgacgcttgataagaagactgctttctcgctttactgatgaccggataattctgtttatcccgcttttgaataagacggctcaactgtttgatggtaggctgctcaaaaagctccttcacctttatatccgtgccgaatgtttttctgatgcgggaaattaacatagaagcctttaatgaatgaccgccgatttcaaagaaattttcatctataccgacgcgttccctgccaagtacagcttcccaaatctccgaaagttttttctccgtttcatttgtcggcgcttcatattttgtttcggacatttgagatatatcaggtcgaggaagtgcccgtctgtcaattttcccatttaccgtcaaaggcatgttatccatttgtttaaagtacgatggaaccatatattccggaagaaagtctctcagaaagtgctgcaattcaatctttgcgattttatgatttgaagtgtaataagcacagatatataaatcatcatcaccattatgatttactgttactgccgcttctttaatttctgtatgattgatcaatcgggcttctatctccccaagctcgattctaaaaccgcggattttgacttgctcgtcccgccgtccgataaactccacatcgccattttctaaataacgcactaagtctcctgttttataaagacgtgctgaaggatcattattgaaagggtgtgatataaaccgttccttcgttaaatcaggccgtcgccaatactctcgcgccagcccatctccgccaataaacagctcaccaggaataccaggcgctaccggttttaattgcgaatctaaaatgaatatttctgtaccagaaataggcctccctataggaagcgtactgcctttccaatcatgagggaccgggaaacaacaggtaaaggtcgttccctctgtcggcccatatccgttaattacttgtacctttccaagtgctaatactttttgaacatgcggaacggaaaccacatctccgcctaccaataattgctgaagcccttttaatgattctaactgctgatcaactactagagaaaataaaccggccgtcagccaaagagtcgtaatgttatatttttttacagcttctgcaatatcatcagccgtcggtattcccggaggcattatagccagacatcccccattcaataaacagccccagatctcgaaggtagaagcgtcaaaagcggcagaagctaattgcagaaacgtttgattctcatcaaataccgcataatcagtctccttcaccagccgaatcacaccgcggttaacaatacttactcctttaggcagtcccgttgagcctgacgtatacatgacataagccaggtcatccaaggaaccttttatgccaatattagatccatccatcttttcaatttcttctttcataccatccaaacagattacgccgtccccgtgaggcgggagttgtgactgaatgctttcgtttgtaatcagcaactctacacctgaatcttcgattaagaatgatagtctttgcttcggatattgagggtctaacggcacataagcaccgcctgactttaatattgccagaatactaatatacaaatcaaaagagcgttctaaagcaattccgacaaggtctccccgttttactccgcactcctgaagataccgtgccagctggttcgcacggtgattaagttctgcgtaacacattgaagagttttctagtaccaaagcagtcttatccgaatattcatcagcctgctgctcaaacacctccgaaattgttccaattttcgaataattatcttcccagccaaagattttcttttgcttatttttttctttcaggaatctcatatctttcactctgatattttcaggagttatcatagcttcaaggatcatctgaaatcgcagtgacaaatcttttatcatattttgagaatagaggcattcgttatagtgtatggctgtctctatgtattgtttctggtttataaacgaaaataggatatgaatagcgggattttcttgattaagtatgtattcttgaatattttcaaggactatcatgacatcaaaaggaaggccagtcattttatcacttgttcgagaattattttgggggctttccaatgcctgttctacggtgaattcgactttatgtatgatctcttttaataggtcttcaccatgaacagcatttttaagagtcaaaatttcttgctcagaatcaatcgttctgttctttctgaaaacaggagtcttgattacaatattttgtctttctgtatattgatttattaacaaagtcagtgccgctgttaatacgacatgcagacgttcatccgatccattgcagcatacattcagcttatcgcttaattgctgtgacaatttatatgtaagatttttcattcttttttctttagaagatttacttcccactaaaaaatgctcttcagtttttaactcaccaatactgtttttatctccctttatactttttgtcataacaaaaactccttcacttgatatcaaaattcaattcattcactgaattaaaacagcagaggctttcggtggatttttatgttaaactgcatcacaggcaataacgctcaccaataattgttgttgtagtctgacagtttatttatcggcagcaaaaaccattttttaatgatatagacccgtataaacactttttttaaaaaaaggataatgaagaagaactagccatctttaagaaatattatacaaatatttaagagttgtcaattagcagggaaaaacacctaagcacattaacccagtttttatttttcgtattaacataaaaaaaccgggacaaagtaacactcccgatttttcaatcaacaatttatctcaaggttttatttataatgtcagttatttcattcgaaaattgatgaataaaaaagtgatttccttcaaacgtataaaaattgcatttccctaaagtataatgtccccaattacatattaaatctgagcttatcgtcttgtcattaataccatgcaacactgttatatcacagtccataacagtcttattttcagaaataacatccttttctaacattttgaaatcacttcttaaaataggaagatataattgttgtaattccttgttatgtaacagttcttccgaagtcccgcccatatccatgattctttgcaaaaataaattatccggcaaagcatgaatcatcccctctgcttttttcgttttaggaatgccgcatccggaaaaaaatatgtgattgggcttcttctgctgcatttcagcaattttacaatataacttataaactaatcggcctcccatactgtggccgaataaagcataatcacactccctgatttgatcctttatcagatcatatatatcattaacagcctcatctatatgttcataaaaatcttcgttaattcttgtacctcttccttttaactcaataggatgtattgttaaagagtcactcattaaccttctccatttatagtatattgcacttgatcccctgcatacggaagacaaaatatttttttcataattcacctcagaaattttgtaataacccgataaaaaaacaccctgaaaaggatgtttttactatctcattttatatatgaaatgctcttgaaactccgttgatgatgaggaagattcctattactcttaaaatgatccttgttgttctgttatcttttccaaaagcaacttgcccgattttaccgataaatacattcatgagtacacctataattaattcagccattccaaatagttcttccatacccaatttcctcacgtcctttttgatctgttaattttatccgattattgttgatttaattttcttttttaatctccctgcttatcaagatgaaagatacaataatacttaataagccgacacttgcaaaaattacgatcggaagccattcagttcctaaggtactcttactaaagataatgttgtttaaagactgtattgcccatgcttcgggtgtaaatttagaaataacctgcatatattttggagcaatttccaatgagaaaaaggaaccgcctatcatcccgcttactgcaattatgatcgatgcggcagaagtaaactgcttttggcttctcataaatggaaccataatcatcgtaatgcaggtcaatgcaaataaataaacagcgagcataacagcgatggcaaagatgttatgacctatgctgatcttgagtaagtattttcccgcaagtattataacgattatatgaatgattccggaaatataagtagcagccattttggataaaacatattttgtatagtttataggcgtacttagtaatcggctgaaagtattattctctttttcatcaataagtgttcttaacccttgaataacaacaaaccaaataaacattacaagaaaaccaattaatctcacggtcgcattatcctgagtatgtttaccctggcttaatgttttgtcattcacttctattcctgaattgtttttcaatttcttgaaaatgttcttttctatatcttttgagtccgtatgcaactgcgcagacatatattgcgaatctttaactacctttttaagagttcccgcctcatttttgaccagctgctctaacaatgttccgctgccgttctcatagttttggatgattttcatttttatcttgtgattgtccgccaattcctttccaaaacctttttcaataacgaccccaaaaggaatatcctgatcatcgacttttttctttatttcattttccgttagctttataactttaatatttttatgctcttttatcatttcaatgagctttgcagcatagttgcttttatcagcattggctatatacaagttctctttgctatccgtatcttgggaaaaagagaacaaaaatgtaaggattaacggcactgaaatagttgcaaaaattgctaatctatttcggagcatcagcttcagctgatgtttaatcatggcaatcaattgcactactacgccaccttcttcctgttgaataccataatattaataaagacaaagatgagaccaataccaattagctcaagcaaatcaatatacatgccgctaaggccaatattctgtttgacttttaaataagagtttattgccttaccgttcggtatgatctcttggacaaccctcaagctatcaggcagtccgttcttaggaataaaactgcctcccaaaaaactaaaaatataaagaaccggagaagccatactggacaccgccacgtggtccttagcggtaaaaccccaaaacaatacaatgctgcctatagcaaatgcgtatactaccgtaataacaaaaatatcaaacaagttgccccagttcattcggaatacgacccagcttatcagaataacagcagtcatctgcattaagatcgcaaaaataatacctgtcaactttccaagcacatactgaatatttaaagtcggtgtagatttaattctgaacagcgtattattctgccgctcatcaacaatgctatgaacaagcacaaaagccgtcataatggaaaacataacaaccattgcaattgaataatactgcatggaatcgacaggaaccgcatttttatttgtcgctgcttttgggatatcagcggagatcccgtcattatcggccaaatcgttcatcattttttctattttttcttttggtacgctgccgccggggctgatatgttttattacttcttgttgctcagcactcattgttttcacgcttttcgtaaagccctccaaaacagcctgaacaatatttttatctatggtcttattattatctccaattaaatcgatatttgttttcccgttgttcataacggctttcgtaaagtgttccggtacatagataaaagctgcagcctttccttctttaactaatttttcaccgtcattgtagctctcagcttcttttaaatgaatgatatctttgagatctcctttcttaaaaactttatcctttaagacatcacctaaagaaacactctctcctgaatctgctgagtaaaaagctacatcaaatgcttcgatttttgaatctgaattactgaacacactgcccaatatgaggattagcagtgatggaaacagcatcagctttaaataaaatgacttattttttgttaacagcttaaaatcaagaaaaaataagttgaataattttctcaagatagcctcctcctactaatctcttaggtttttccctgtaatttgaaggaaaatgctttccaaatttacttcctcgtacttaaagctagtgaggtcgatccccagatttttgatatcatctacaatttcaatgatgtttctttccttcgtcgatacaagcattgaaatttgtttatgatctaccgtcactttatcaattcctgtaatgctgtttatccggctgagtgcctcttcatcagcacccttaaaagtaacagttaaagtgtcacaagcatttaagttttccttgagttcttctttcgttcctaaagcaataagagatccatgatcaacaattgccaccttctcgcaaagatactctacttcttccatatagtggctggtataaataacagtcattcctttttctttattcagcctttttactgtttcaagaatatgatttcttgattgcggatcaattcctacagtaggctcatcaagaattaataatttaggattattcattaacgccacgcctatgttgacccggcgtttcattcccccggaaaactctgatacattttgattttttttatctgtcagttcaataatctccagaacctcatcagttctttcttttagctttttccctttcagcccgtaaaggcttccgaagaagttcaagttatctttggcgcttaacgtttcatataaagctaaatcctgtggaacaacccccattattttttttatctcaataggtttttccttaagtgatttattatctactttaattgtcccgctggtaggtgcaagaacagtgctaatcatagaaaccattgttgatttgccggcaccgttaggacccaatagtccgaatacttctccatcttctacagtcagcgaaatattattaactgccgtaaagtcatcatattttttggtaagtttttttaattcaagcataattaaaacacccctcgtggtatttcggttcttttattttaacctgaatggaatatttttagaatttactatagtactcatttaccttattactttagttacgaatcgcatcgttactttagtcatatacggaaggtgtaagtccggatatattcagaagaaaatggaggaaaggaatttgatgaaattcctttctgattgaaggaaaaaagttgaatcacatatgcttttgtaaatataagctaagctccgttcggttgttcatttgaagtttttccagtattcttgatacataatttttgactgtgccttcagtaataaacagtgcttcgcttatagctttgttgcttttcccttccataatctgtttagcgacttctttttctctgggagtaagcaattgcaccagctgttccttttcattattttcttgaacaagctctttattatgttctaccgaatttagagcctttacaacttttagcgttaccttaggatttaacagaatattgccttcacatgctgttttgatggaatcaataatttcttgtgaatcagaatctttcagtatgtaaccatcagcaccgcttttcagtccagtaaaaatgtattcactatcgttaaaggttgtcaggataatcactttaatatccggatatctctctttaactagctttgttgcttcaatgccgtccattacgggcattcttatatccattaaaatgatttcaggccttatctgttttagcaaatctaataaatgttcaccattagaagcttcgcctacaatattaatttcctcgtgcagactcagaatcattttaagcccttccctgacaatttgctgatcatccacaatgataatatccatatcaatacctcctcacattccgattaaagatctgctatctcggggattacggcttccacagtaaatcctgaatctagccctgaataaaaatcaacctctcctccaagtgcggcaaatcttttttctattccgtttattccatttgacttattaatttcagaacatcctgttccgttatcagttatcgatatagagattttttcaaaagacttacgtatttttattgaaaaaaacgtagcatttccatgttttatcccgttggttatagactcttgtactgttttatagagacaattcttgatatctggatcagctgactctactttattgtccatatcaagctcgaattttatttcatttgtttgctgaaaattttcaaaaatctcattgatcgatttcagaagccctttttgaggagcagggtcattgagcaaagcgacagcttctctcaggttaataatacactccttcgataaatcatgtgacttattgatgacttgtttagcctcgccgggatttttacttactattttatcggcgaattcaagattcattgttaatgcgatcaaataatgccccagggaatcatgaagctcttgtgcaattcttgtccgctctttagaaatagttaactcttgaattttttgagaataattcttaagtttagtgtttacactttgtaattctttatttaatgtttgtatttttgctttttcgagcagtacgtttctaaacagataaataatagccatgatcactaaataggacatcaatatatctttcccgctggtccctgctgctttaagagctgtaaaaaaaataataaaatgcagacttactacagtccagggcagtttacgagttgttacaataatctcgatcagtaaaaaaatattatatatttgagaaccgagacagttaattttaaacaataaaatgcctgataaaaggttacttactaaaaaagatgcataatatctaaaagaatactgaccgcttaggtattttaatctgatatgatcgttgacgactaaaaaaatggtgataatcagcaggtaagcggattccgaagccgtaaaagttggcgttttaaaaatagaactgataatagaatataaggaaaaacaaataatggttttctctatgagcactcttgtactaattgaagaaagatttttcataataatccttcccgagacaacttgatataaattatattatacatatattgagaaatcataaagcgacaacctccacgttcagcacatcatacagctcatcaagcgaatgaatttcatacgtcgggataatcccggactcatttgctttctttccgggattaaaccagcacgtatccattcccgccatctgaccgccttttatgtccgcgctcaatgaatcgccgataataagcccgtgcccggcagaaaaaccgggaattctcgcaaatacataatcaaagtattccttcatcggcttttgaaaacccgtgtcctcagatacaaacacatctttaaaaaacggatacagaccggagtcgcccagccgcttatattgtgatcttgagacgccgttcgtcacgatgtataaatcaaataaaggactcagccgttcaatcagctcataagctccgtctatcatctggtgcccttcttctaagtattggcggtacgcctgattcatcagcacgccgtcggcttcaaggccgtattctttaaacaaaagggcaaaccgtgtattcaccacttcatcgcgggtcatttcccctcttcaaacgccttccacagcccttgatttaacgctttataacgggcttccacctctgccgtcagctccagctttgaaccttggaacaatttttgaagagcatcggtttctgaagcggtaaaatccagcagcgtattgtctatatcaaataataacgtacggtaatgactcatcgatgtttcccccggttctgctttttttaaccagtataccactcgcggacaagccgaaaaagacacccctgtaagagaggtgtctttttgaattatacagcgtcttctattttcgatttttcaccaggcatgcgcttgccgataccgaacgcataatagctgaccgtcacaatcgccaggaaaatcaccccgacaaccaaagaaatccgcgtatctttgttaaaccacatgccgatcaataccatgagtaagaaagcgatcgtcaaatagtttgtaaacggcgcaaaaggcattttaaacggatgcttatcaagctcagcgcctttcgctcttctgaaaccgagatggctgatcaaaatgacgaaccacggaatcattcccggcagcacactcgcgctgtacacataaacaaagattttcggaggcgcgatgtagttcagcacgacaccgatcacaagtccgattaataccgcaagcgtaccgaatatcggcacaccgctcgaagaaactttcttaaagaatttcggtgcctgtccgttcacgcctaacgtataaagcatacgtcccgcactgaatatcccgctgttgcatccggacatcgcagcggtaatcaccacaaagttaatcagaccggccgccgccgtaatcccgactttcgcaaatgtcgaaacaaacggactgccgagtgagtgaagctcattccacggatatacggtaacgattacgaaaatcgcaccgatgtagaaaattaaaatccgccagataatactctgaatcgcgcttcgcagcgttttttgcgggtccttcgcttcccctgccgtaattccgatcagctcgaccccttgataggccgcaacaaccaaagacaaagcaaagaaaaatcctgaaaaaccatttgtaaagaaaccgccgtgcgaccataaattagataatccgatcgcatgccctccgttaccgaaaccgaagaaaataattccgattccggccacaatcatcagaataatggtgacgattttgatcatggcaaaccaaaattcaaactcaccgaaagattttactgaaattaaattcgccgcaccgagaatggccatggcgataatgccgggaatccatgccggcagatcaggaaaccaatatttcatatacgaaccgacggcgataatttcagacatcccgacgatcacccattgaaaccagttgctccacgccgtcatatagccggctaacggatgtatatacttatggccgaatgtcgcaaacgaccctgtactcggctctacatagagcatttcgcccatcgcacgcatgataaaaaagataaagatacccgagatcgcataagccagcaggacagacggcccggtccatccgatcgtgctggatgaccccatgaataaaccgacaccgatcgtgccgcccagcgcaatcatctgtatatgacgagcgcctaagcctctctttaattctttgtttgccacttcgcttcctcctcttaacagctctgatatatgtgaaataatgaagcagaaggtgcacctgttgaacctaactcactcttcatttcccgcaatattggaaatattctatcttcctatcgttatataatctccaatttccttattccatcataataaattttcgtggaaaatacaattgtttttttcaggcaaacaccttacactctgaaccaacggactaaaaataaagcgctttcatttttattgaattgtgaatattgagataataaatgccgcagcctccgagaaacattatttcccaggagaaacgttttccgccccctatccaatattatttttgctaagcagaatggcgtaaagccttactctcttccattctcccttgtatacgccataatcctgcttaacccggcaaaaatcatgcattaatcgataaatgcctcattcagccgcagcaaaagccggccgaacatttctttttcatcgccggaccaatcgtcaagcatacgatgataccgctcaagacgcatctttttatcagcttttaacctctgtttgccaagcttcgtaatcgcaaacagactgacccgcccgtcagaaggatcggaaaaacgctggatcagctctttcgactccaaggccgctgcctggcgtgataatgtggaaatatccagcttaaatgattcggccaattccttcacacgcgccggcccgaattcatccagctgccgtaataacaaatacgcagccctttccagatgtccgattttacggtcggagttatcaagataaacagctctcctgatgaaagtggtgagttcatattcaattaattcaatcggatcttgttttgacaaacgcctcactccttacattgacaacagcaacattagttgtataatacaaacatatgcacatttactcagaaaacatatagaaagattttgcatacatatatttgtatagtacaaatatatgtgccaaaagtaaagaaacttatagaaacatcaagaaagggggaagctgctcttctccaaagaacagcatcgttgtgaaagtcatacgcatcatcttgcaaatcattattttattcgcattttcctttatcgggggagccgttcagcagttctttcacctgcccattcccggaagcatcatcggtttgatcctgctgatcatatgtttatcggttaagatcattcccgtcaaaatgattgaagacggagccggatttttgctgtcttttcttccgctgttattcattccggccatgacgggcgtcatcaattacccgtcactgttttccgccagcggggctgctctgtttctgatcatcgtgctgagcaccatcgtcacaatgatcgccgcagggtacgccagccagctgttagagcataaagccaatcagagaaaggagaaaaagaagtgcagcaagcatgtatcgcaatccttataattttgttcacggccgccgcctatctggctatggtgaaattatatgtgcgctttccatacccctttctcataccggttttgacgactacgattttcattatcgccgtgctgcttgtttttcatattccgtataaagactatatgatcggcggacaatggatcaattcactgctcggccccgctgtggtggctttggcatacccgctttataagcagcgccgggtgttaatcaagtatatgtttccgatcatcggcggcgtgttggccggtttattctccggaatggtcagcggcctgctatttgcagagctgttcggcatcagccggagtttgattttgtcaattatcccaaaatcaattacgacgcctgtcgccatacagattgcgtccggtatcggcggtgtcccttccatgacagtcgtgttcgtcatgatcgcagggttttccggcgttatcttaggaccgctgcttctcaagtggatccgcatccgcagctcactcgggaaaggaattgcattcgggagcgcctcccatgcgctcggcacctcaaaagcaatggagtacggagaattaacggtctccatgagttctgtttccatgacgctctgcgccgtgttagggtcggtcttcggccccgtcgtagcatggatgtttcaaatttaaagccggcggttctccgtcagcttttttcatgtgcggatcatctcatttccttccattattatgtttcatttgtaagaataatggtaaagtagaaaacaaggagggatttaatgatgactggggcaattccgcaaaagaaactgcttgatgggacaagcattcccgcgatcggcttcggtacatacgctcttaatggaaacaatggcgttcatgccattaccagcgccattgatatcggctaccgtctgattgacaccgcttataactatgaaaatgaagggacggtcggagaagccatccgcagaagctctgttccgagagaacagctatacgtgacgtccaagctgcccgggcgctaccatgactatgacaaagctgtacaaaccatccaagaatctttataccgcgccggtctggactactatgacctgtatctcgtccattggccgaatccgaaacaagaccgctacacggaagcatggcaggcactgattgatgcgaaaaaatggggcctgatccgatccatcggcgtctgcaatttcctgcctgagcacatcgaacggctcgaacgtgaaaccggtgtaaagccaggcatcaaccaaattgaactgcatcccgcttttaatcagcagcagcagcgccaatggcacgaagaacagggcatcgtgacagaatcatggagtccgttatcccgcgccggcgaagtattgaacgatcaaaaactcggacagattgcggacaaatacggcaaaaccatttctcaagtcattttgcgctggcatatccagctgggcgccatcccgattccaaaatcagcatcgcccgagcgccagcttgaaaacatctctgtttttgatttctcccttgatgaaaacgacatgagcatcatcgactcgcttacccgccccgacggacggataaacggccaagacccggcggagtatgaggagttttaaaaaaacacataaagaaaagctgacggcatcatttgtcagctttttcaccttttactctgggatagccaagactgtgaaactttgcagtaaaggctggaaacacacttatcctattataaattgatcagctgctaaaattcttttttatgatatatagctgcggcgatgaaaaatgaaatgatatataagataacgccgatcatgagatatataatcgggacatataaagaaggatttatgtgcaaaaatgacagcggtacttgttctgctgcatacccaacgacactttgcaatccaaaggtagcaaaaagtccccccattgcccctccaatcacgatagcatcggatttttccgggcctatcatgtagagaagaggataaacgattgcaccggcaaagagaacgatgaacgttccaaaagagacaatattaaatataccgtcaattggttcatcagaacccaggctgtatacaaggaaaataccataagatattacagctccgatcacaacaatcaaaagataaaagaaatagtgactttgaacaatatttgttctgctgaccggtaaagtcagaacatacctgtcatagcctgacttgctctcatactttataacctcaagtgcgggcataacgacaaacaaaataatcagcatagcaacaaaacgatgcattgaagcatccccaaaataaaaaatgactgctgataccaatatggccaaccccgtgtatgcaaagaaactccgataaaccaagtaatagttagtcagtaacagacctctcaatgttttcactcctcgttaaaaagacgctgatttcttctatggaaatggtgttggccgttacgccattcggcaatttctgttgatccgatacaagcacactccaataagatccatgattcctttttgctagaacgatatcttcgtcaatctcagccaattgaccttcatcaacgtctataacggtatagctttcaagaaccttatctttctcttcatttaataaaatttcgccatctttcatcataatgatatggctggctatcttctcgacatcagtcataatgtgcgatgaaagtaaaatacctccgttgcttttactcacaaagctttttaattcatttaacagatcatctcttgaagagggatcaagccctcccgttgcttcatccagaagtaataattttgcattatgcgacaaagcaacagctacagataacttcattgacatgccgcgcgagaatgtattcacttttttatccataggtaaagagaaagaatgaaccaaccggtaaaattgatcttggtcccaagcgtcgaacagtttcttaaatacatgattcagctgctttatcgtaaggtgcgcgggaagattcatcgcatcaaatacgaccccaatatcttctttaaactttatatgtttatccagattctctttaccaaagattttcactttacctctatcctgagagattaatcctaatatcgttttaaatgttgttgacttgcctgcgccgttatcaccgataaaaccgacaattgatccggcaggcacattgaatgtaacatcctttaaaacagctttatgaccaaaagatttgctgatgtttctgatttctaaaaggtttgacatcattccactcctatcattgttgtcaggacttttttaagaattgaaccggattattgtaaaaatgttgtgattttcatatctggtctaggtattcataatggatcaggagtcgggaaatacaaaagggattttaaagtcttaagcataatatggaagtgtaatcgattgattaggtttatataatgggatattcatgatgaaaactgctgaggtgtttactttccgatgaggtatacacaaaatgatttactaatgattacatttatggattttaaccggaatgcatctcgtattataaagcaggtgttactccttttcaatatataaaaggggatttctttacaatcgcaaagagtatgcatttctcatttccgcattaaaaaacccctctggctaataaccaaaggggttaaatatattattccacagtcacgctcttcgcaaggttgcgcggtttatcaacgtcacagccgcggtgcagtgccgcatagtaagcgatcagctgcaatggcacaacagaaaccagcggagcaagcgcagggttgacttccggcaggatgaatctgtcgtctgcgtcttctaagcctttcagcgagatgatgcaagtgttggcgccgcgggccgcgacttccttcacgtttccgcggatgctcaggttgacgtgttcttgtgtcgcaagcgcaaagaccggtgttccttcttcaatcagagcgattgttccatgcttcagctcgccgccggcgaagccttccgcctggatgtaagaaatctctttcagcttcagggcgccttcgacacacacgaagtagtcaaggccgcggccgatgaagaaagcgtttcttgaaacagtcaggtactcacgcgcgatcatttccatttcgtccttctggtcgcagagggcttccatggcgtttgccgcaatacctaattctttgaccaaatcaaaaccgatatcaacgccgttgcgttctgctgcaacggacgcaacgatcgcgaggacggcaatctgagccgtatacgcttttgttgatgcaaccgcgatctcaggacctgcgtgcagaagcaatgtgtaatccgcttcacgggaaagcgttgatcccggaacgtttgtaatcgtcagcgctttgtgacccagcgctttgacttgaacaagcacggcgcggctgtccgctgtttctccgctttgagaaaggaagataaagagcggcttcttagacagaagcggcatgttgtaagagaattcactcgctacatgcacttcaaccggtacgtttgcccacatttcaatatattgtttcccgacaagaccggcgtgatagctcgttccgcaagccacgatataaatgcggtccgcttccgccacggcgtcagcgacatcgcccgccacggccagtctgccgttttcgtcctgatacgtttggatgattttgcgcataacaagcggctgctcatccgtttcttttaacatgtagtgagggtatgtgcctttttcgatatcactggcgtcaagctcagcgatataagacgcacgtgtcatgacttcaccgtcaagatttttaatcacggcttcgtcttttgtcacgatcaccatttctttgtccaaaagctcaacgtattcattcgttacttgaagcatagccatcgcgtcagatgccacgacgttaaacgtatctccaaggccgattaacagagggcttttgttttttgcaacgtaaatggtgtctgtgttttcaccgtcaaataatgcaattgcgtaagagccttttaacagagtcagtgttttgcggaacgcttcttctgtgctgagtcctcccgccacaaattgctcgatcatttgaacgactacttcagtgtccgtgtcgcttttcagttcaacgttttcaagatactcgcgcttcagctgaacatagttctcgatcacaccgttatgaacaagtgtaaagcggccgagtgcgctttgatgcgggtgagcgttcaggaagcttggttcgccgtgagtcgcccagcgtgtatggccgattcccgcttgagattcaaccgtgtggtccaccacttcacgaaggtcggcgatgcggcctttttctttgtacacatgcacgccctgctcattcgccacagcgataccggcagagtcatagccgcggtactcaagcttctctaatccttttaacaaaatctctttcgcatcaagctgaccgatgtaacctacaattccacacatattttcttcctcctaaaggtgtaaaaggagacgaagaaagtcaaattacaaggggactttcaatcgtcccctcccacatgtttttttggaagatcatgtgatttccctttgttcggagagtcgcccctccggtttgaagaaatccttacggctgtgatctaaatgaatcagccgggaggcatccgccgaaaattcgataacctccatcctcgtcaactaagccgtttttcgggcgcttagttcgggcgctgtaattataaaagatgcaaacaatcccgcctttcctgcaagtgaaaaacaaaggctgaacaagcttgattttacagcatgtgccaaggacggtcaattattttttgccgccccggcatcatgtttactatcattttatgctgatcgcacttgtcttgttcgctctctgcttataaacttcgctactccgctcccatttctgtccgcacgacatccacgatttttgtgacatattcgtcacaaagctcttttgttctcgcttccgccatcacgcgtacgagcggttcggtgcctgacgggcgcactaaaatccggccgtctccgttcatttctttttccacttcagaaatcacggccttcaccttagcgttttcttctaccttatatttatccgtcactttcacgttcactaagagctgcgggaattttttcatttcatccgcaagttctgaaagggttttgccggacgccttcagcgtattcacaagcatgatcgcggacaaaagaccgtcgccggtagtgttgtaatcaaggaaaataaggtgccctgactgctcgccgccgacattatagccgtcttttttcatcgcttctacgacatagcgatcgccgactgccgtttgaacgcttttgatttcttctttttcaagcgctttgtagaaaccgaggttgctcatcacggtcgatacgacggtatcatccttcagacggccttctgatttcaaatacttcgcgcatatgtacatgatctgatcgccgtcgacgatgtttcctttttcatcaacggcaatgaggcggtcgccgtctccgtcaaacgcaaggccgatatcggcgtttttttctttgacgaaagcactcagcgcttccgggtgtgtagaaccgacgccatcattaatgtttaatccgttcggagacgtccccattgtagatacgtcagcatcgagatcggcaaaaaggtgcgtcgcaatggaagatgtcgcaccatgggcgcagtcaagcgctacatgaatgcctgtaaaatcttcgtccgccgtctgttttaaaaattgcagatacttttgaacgccttcaaaataatcgttcacaagcccgaggtccgcgcctgtcggtctcggcagcttatcttccggttcctccatgagacgttcaatctcggcctcctgctcatcagaaagcttaaagccgtcccctccgaaaaatttaattccgttatcctgtacggggttgtgagaagcggagatcatgacgcccgcctcagcatccatggctttcgttaaataggatacccccggcgtagaaataacgccgaggcgcatcacttcagctccgatcgataaaagtccggcgacaagggctccctccagcatatgtccggagatacgtgtatcacggccgatcagcactttcgggcgctgcttatctttggtcaggacataaccgccaaaacgccccactttaaaggccagctctggcgtaagctcgctgttggcaacacctcttacaccatctgttccaaaatacttgcccattttgtatcgctcctttttcattctgttgaagaagaatcagcgcttgatccgtcttcatcctggtcttgattttgatcctggttttgacttttattctgatcgctgtcagtgtcgtcttcccggttcttgttcttgtctttgtctgcgtctccgcttgtgccgttcttattgccggaatcagcggagccgccgtcatttttatttgaacttgtgtttttcttagaagtcagcttgatcttaaccgtgtcttttgacagggaccatgtgacgttttgcgggccgtttacttcaagctttacagagtgctctccgtcatccaagtccgagacattggcatacagttcaatgtccgactttttcagcgccttaatgttggcgggagagcctttggccgtaatatttatcgcctgcgattcagggtcgagaaactcaatctgctgtgagcctcccagtccgaccgtcttgattgcgacattgtcaaaatcctttttgtcttcactgtccactttaacatgaagcgtgattttttccggtgataccttagtgacacccttaggaagcgggatatcggcattgatatcggtatctttatcaattttgcctaaatcaagagatacgccgtcaataaattcaagtgaatccagcacatcctgcgggccgtaaaccgtcacctcactcggattcgagtcaatgctcgcaacgctcaccccgtccggaagacttcccttcctttcgattttgaaaggaagctttttgctcggactggctacgggaaccgtcactttaatgactgacggttcaacatcaacaggaagtgcgttgccgtctttgtcatagacggtcaccttcacttccttttcaatggtctcatttgcattttcaaggttcacagatgctttgacaagtgaaatgttatcaatcacatttttcgaacctgtaatctgcacgtttttcgggctgataatcggctgctgaggggtatatccctttttcattttgcttttattgtagtattcaacttccacgggaaaactctcagccgttttttcctgaatcgtaaccgtcgtgactgacgggtttatggagatcgtcagtccgtccgatacgtttttcgccttcaattcgaccttatgagtcccggtcttcagcttattcatatcggcgtatatctcaaaattcttcgtctgtctcgcctttttcaccgcgcttgtcgagcctttaatcgtgacatttaccgtctggggcacgccggtgacgacatagttcgcttcatcgtagtatgcttttacaggaatatcagtaagcgtagcctcgtcagtcgttgatgtcggaaaaaaggattcccccggctttttcggagtcggcgcctggttgttgttaaccgcaacgtaaagcagcagcgccaagagcaatgcaatgatctttacagcccagcggttgtttaagaatttatccatttttcttgcccctccagtaccagcggttagaagaagtgtctctggcgttcttcttaaactcggcttcaagcatttctttcagtgcttcttccgtcaattctctgtgaaggtctccgtttctggccacactgatggcgcccgtctcttcagatacaataatggttaagctgtccgtcacttcactgatgccgacagccgctctgtgacgcgtccccagctcctttgaaataaacgggctttcagaaagcggcagataacaggcagccgcagcaatctcgttatttttcataatgaccgctccatcatgcagcggtgtattcgggatgaagatattaatcaaaagctccgagctgacctgcgcattaagcgggatgcccgtctcaatataatcgcccattcccgtatcgcgctcaatggcgatgagtgcgccgatgcggcgtttcgccatgtagctgatcgattttgtaatcgcttcaattgtcttatgctgcgcttcctccacaggggttccgctcctggaaaagaaccggccccgtccgagctgttcaagcgcccgtctcagctcaggctggaatataatgatgatcgctaaaaatccccatgttatcgcttggtccatcagccactgaagcgtgctgagtcccaaatatgaactggccatccggaccaatacgatgacgacgattccttttaaaagctgaaccgccttcgtcccgcgtatgaccatgattaatttatatatcacataccaaacaaggagaatatcaacggcattgccgaggtattgcaaaaatgggatgtcctcaaaagccatttcctcgtcctccaagaattcagtcatttcgttttttccgttatgaattgtgctgcatgagcaatatgtacatcatatagcgtgctcattataccacattttgatttctcaagtgaaatgagccggcgcggcgttgcacaaaaaaagagtaaagcgattatacgctttactcatcttcattcgggtccaaagcgcttacgacgccctgtcccgccgatttcagttcgtaccagacccagtcaaacaattggttaatctcttcaatctgcccggtgacttgtccggctgaggccatgtatttttctccgttgacgacggtcacattgccgtcgacttttccttcaatgaacagcttgccgttttttactgtgacatcgccctttacggtctcgccttcagggacggtgaccgtgtgattctgcacgacaaggttcggctgtttggacacactgaaattgtggtcattatgccagctgttgaaaaaaccgccgcccattaaaatcacaaaaaccgctgcggctgcaatcatcggatgagttttgatccatcgttttacagaagcgcgttttttctcttttggaagattcgccataactttggcagtaaaatcagcaggggccgtgacatgcgatgtgcttcggacgagtgctacggatttctccatttcatgaaaatgccgtttgcaattcccgcatgactgcaaatgttgttttaatacgttttcatcttcaggaaggatatctccatcaagatgcttatgcataagctgcacaatctgttcaggacagctcatttcatcaccccacttaaagatccctcaattgttttctaagagcctctctgcctctgtgtatccttgtcttgacggtgccgacagggatattcagaatctccccgatttcaattaaagagagttcgtcaatatactttaatacaataaccgttctgtacttgtcaggcagctttaaaatctttttctgaattgtgtccgacagctccaatgacaatacggcgtcttcagggagaaccccgtccgcggcgatctgcgaatacatcgtcagcccttctgctcccgctacttctgcgtccagatagtaatcaggctttttcttgcggatgcggtcaatggtcaggttggtcgcaattctgtaaagccacgttgaaaactttctgttgatatcgaaactgtcgatattgacatacgctctgataaaagcttcctgcgcaatatcttccgcttcgtgaacattgccgagcatgcggtagcaaagctggtaaatcttatctttataaaggtcaacgatttctgcaaacgcattttgatcgccttttttgacttgcttgattctttttttaatcaggttttccatgttttatcttacctctgcccttcaccggtctgtatctatacgttgattgttttaaaaggtttcatttttttattacatttattttaccaaatttcaggcagggtgtagatggaaaatacagaatatactgccttaacagcagcttaaaaatagtatatctgatgaacaatcaaaaaccgaaacaaaatgccgataaaaaaagacacctttatgcaaaaggtgtctgagactgggctagctggattcgaaccaacgcatgacggagtcaaagtccgttgccttaccgcttggctatagcccaaaaatggtggagggggcagattcgaactgccgaaccctgagggagcggatttacagtccgccgcgtttagccacttcgctacccctccgtatttttttggaaaacagtgccggccagaggacttgaacccccaacctactgattacaagtcagttgctctaccaattgagctaggccggcaaatatggtggaggatgacgggctcgaaccgccgaccctctgcttgtaaggcagatgctctcccagctgagctaatcctccatatgacccgtacgggattcgaacccgtgttaccgccgtgaaagggcggtgtcttaaccgcttgaccaacgggccgctgtgtccgcgtcgagctgacaaaagttattatatacaggttgtaccccatttgtaaagagaaaaattattttttttattttcaaacttttttacccgttttttaactgaaaaactcatccctcctctcttatttcatttatgatgaaagtatcaaaatattgaagggaatggacacagatgatcttagtcagctcttgtctcggcggtatcgaatgcagatataacggctctcacgccgcttcggaaaaaatccgcagactcgtagaagaaaagaaagctgttatggtctgccccgaacttttgggcggcttcaccactccccgcgaaccggcggaaatcatcggcggcacgggtgaagacgtgctgaacggaacggcaagaatcgtaacggcatcaggcgaagacgttacagctttatatatggacggcgcggaaaaaacgttagcatacgcaaaagaaataggcgccgcaacggtcatccttaaagaaaacagtccgtcctgcggcagcagctttatctatgacggcactttctcaggaaaaaaaatactcggagacggcatcacttccgctcttttaaaacgggcaggctgccgtgttctatcagaagatgaattggatcaattataaaaaaggagagtagatatcatggatgtagccctgtccttttataaaccggagcatgcagacgggctgaacgggtttgtgctgagtgaagaagataaaaagttcacagctctgccgatagatgtcctgccgcaggcgcttgtcatccgggatcgctacccgacagtcattttaaaagaagaccgccccgtcggtttttttattttacatacctcaaaagaaaccattgctccgtattcgaacaatgtgtctgccattttgctgagtgcgctgtcattacatgcgccgcatcagggaaaaggttatgccaaacaagcgatgctgcagctccccgcttttgtcgcaaattactttccttggtgtgatgaaatcgtgcttgctgtaaaccatcgcaatcaacgtgcaaagaacctgtaccggtcttccggttttattgacaaagggcggcgcaggatcggcccgatcggtgaacagcacattctgcatcattttttgtgaaagcgcttgattattcatctcatccctgccgatttttcttgaaacatctattcagaagcccatatacttcaagtattaacgacttgggagggtacaatcatgacagaccggcttaacattcacagattgaccacagaaaccagaaatccgcagaccgcttcaatccatcaggcagacacaatggaaattctccgcatcattaacgaagaggatttcaaagtggctgaagccgttcagcaggtgctgcccgatattcagattgccgttcaattcgcccatcagtccttacggcgaaacggcaggctgatttatgcgggagcgggcacaagcggcagactcggtgtactggatgcggttgaatgcccgcctacatacagcgtaagtcccgacaccgtcatcggtctgatggccggaggggcagacgcctttttgcaagcggctgaaggtatagaagacagcgaggaaaccggcgctctcgatctcaaaacgatcgggcttaccgcagaagacaccgtgatcgccatcgcggcaagcgggcgcacgccgtatgcggccggtgcgctgaaatatgcaaaaacaatcggcgccaaaaccgtcgcgctcacatgcaataaggactccttgatcagcacctttgccgatcacagcatcgaagtcattgtcggccccgaagtgattacagggtcaacacgaatgaaagccgcgacggcacataaaatgattctgaacatgatttccacggccgtgatgattaaaagcggcaaagtgtacgaaaatttaatggtggacgttcatgtcagcaacgaaaaattgaaagaacgcgcaatcggcattatccaaagcatcacgggcgttccgtacgacaaggcaaaagaaacgcttgaggccgcagacagccatgtcaaaacggcaatcgtcatgctgaagacgaattcggacgaaacacacgcgaaggcactgctcaaagaatcagaaggattcattgataaagccattgaacagcacgtttcaagagaaaaagaacgctgatcgttctttggagaaaaatattgtgcttttacgagcccgcgccgttttcatgttcggcgcaggcgcttttaggacgcgtttcaggcatagctccccgggaaaaatcgtacagaaaaaggaggatctccatgagcaaagaggcattttatcagtcactggccaaagatatcctggacaattgcggcggttcatcgaatatttcaggctttacccactgtatgacacgcctgaggattacacctttagatcgggacaaaacggatattgaggcgctgaaacggcttgacggggtaataggcgtcgtcgaagccgaaacactgcagatcattctcggcacgggtgtcgtcaatcatgtcgccgacgctttcgcaaaacttatgccatccggaaaaaacattgatttaaaagaagccgcctcacggaaaaaagccgatctcaacagaaaaaacaccacacccatcaaattgtttctgagaaaaatatcaagcatcttcattccccttattcctgcactcattgcatcaggtttaatcaccggtattacgaaagccgtcattcaggccggctggctcccgaaagaatcccaaatcgcacttattttaacggttatcggttcaggcttgttcgcttacctcggcgtccttgtcggcatcaatgcggcgaaggaattcggcgggacacccgcgatgggcggccttgcgggcatattgatccttaaccctgagatcgccaatatcagtttgttcggagagaatctgctccctggcaggggaggattaatcggcgttcttttcgctgcggtttttatcgcttataccgaacggtttatcagaaagtacgtccatcaatccatcgacattatcgtcacgcctacattgtctttacttatcaccgggctggtgacatatgtcgtttttatccctgcaggcggttttatttctgatctgattacatcaggtttattgtcgctgctgaatgtcgggggagtgctctcagggtttgtactgggagccgccttcctgcctcttgtcgtcaccggcctgcatcagggcttgactcccgtacatttggaattaatccgatcaatcggagatgacccgcttcttccgattctcgcgatgggaggcgcgggtcaagtaggcgcggccttcgccatctttatgaaaacaaaaaaagcctcattaaaaagagcgatcggcggcggacttccatccggtctgctcggaatcggagagccgcttatcttcggcgtcacgctcccgctcggccggccgtttttgacggcgtgtttaggggcgggaatcggcggcgcctttcaagcccattttcaagtggcgactttttcaatcggtgtctccggccttccgctctcgtttctcgtacagccggctcaaatcgttttgtatatcatcggtctcttcatctcttacgcggcaggctttgtcttcacttatgcgttcggatttaaggatgacatggctgctgaatttgaataaaccgggagggatcagaatatgaaaacactgacagccgccatactcacaatggtcatcagcctctcttttctgccgcagcacaaagccgaagcccaatccaaattatacgacgcagcaaagctcagaaaggttgatcaaatgattgaaaaagacatcgcagcaggattccccggagccgtcctcatcgtcgtaaaggacggacgggtgatcaaaaagaaagcatacggctacagcaaaaaatatgacgggaacacccttttatcccgtccgaaaaaaatgaaaacatcaaccatgtttgatttagcttccaatacaaaaatgtacgcggccaattttgcactacagcgactcgtcagccagggaaagcttgatgtgtatcaaaaagtctcggcttaccttcctgatttcaaagacagaaaaagcgatccgattcaagaaaaagaccgtatacgcgtcatcgatgtgctccagcatcaatccggtctgccggcaagcttttatttctatcagccggacaccgcaggccctttatattcacaagaacgggataaaacaatccgttttctcacccagatcccgcttgaatacaagccgggaacaaaacacgtatacagcgatatcggttacatgattctcggatgcatcattgaaaacataaccggaaaaacccttgatacctatgcggaacaagaactgtacaaaccgctgaaactgacgcacacactgttcaatccgctgcaaaaaggttttaaagaaaaagcattcgcagctactgaacgtttaggcaacacacgtgacggagtcatccatttccctcacatcaggacatatacgctgcagggggaagttcacgatgaaaaagcattttactcaatgggaggggtgtccggtcacgccgggctgttttccagagctgatgatatggccgtccttcttcaagtcatgctgaacagaggcagttataaacacgtttctctcttcaataaaagaacggccgatttgttcacaacggcggcatcctctgatccgactttcgctctcggctggcggaaaaacggcagcccggatatggagtggatgttcggaccttatgcaagcaggcaggcatacggccatacgggatggaccggcaccatcacgattattgatcccgcttataagctggggatcgcacttttgaccaataaaaagcattcccccgtcgtcagccccggtgaaaacccgaatgtttttgaaggggatcttttcccgaccggaagctacggcagcgtcataaaagcgatttatgaagccattgaatgacaacccatgtcttttgtccaaactatgacggcaggagggcaccatcatgaaacttttcatctcagctgtattactgttgttcattgtattcggcacgcatcatgcatcaacaaaaccggacattccgtcacaggcggaacaagcggtatcccgtatgacgttagatgaaaaattagggcagatgctcatgcctgattttcgaaattggcaaaaaaaggggcagtcatcacctgaggctcttacccaaatgaatgacgaagtcgcagggcttattcaaaagtaccggttcggcggcgttatcttatttgcagaaaatgtaaaaaacactgagcaaacggtacgcctgacagatgcctttcaaaaggcgagccctgacattccgctattattaagcattgatcaggagggcggcatcgtaactagacttggtgagggcactcatttcccaggcaatatggcgctcggggctgctagaaaaacagcctacgcgtcccagaccggcgccattatcgggaaagaactgaaagcactgggcattaatacgaatttcgcgcccgttctcgatatcaataataatcccggaaaccctgtcatcggcgtcaggtcgttcagttcagaccgtgatctgacagcttccctcggccttgcctcaatgaaggctcagcaaaagcagaatgtcgctgccgccgtcaaacatttcccgggacacggcgacacggatgtcgacagccactacggtcttccgcttgtcacccacaatcaagaaaggctgcgtcagattgaactttatccgtttcggcaggccattcaggccggagctgatatgatcatgacagctcatgtgcaatttcccgcttttgacgatacaacctataaaagcaagctggacggttcagacatcctcgtacccgccacactctcgaaaaaagtgatgactcatcttctccgtgaggaaatgggatttaacggcgtcatcgttacggatgcattaaatatgaaagccattgccgatcatttcggtcaggaagaggcggtcgtcatggcagtaaaagcaggagtcgatattgccctgatgccggcccaagtgacatcgctgcaaacggaaaaccgctttgcccgggttcattccgcgttaaaaaaggcggtacaaaaaggggatattccgctgcagcaaattaacaaatcagcggaacgcatcatttccctgaaaataaaacgagggatatatcccgcaccgaaagagacaaatctgaaaaagaagattgcaaaagcaaagaaaaccgtcggcagcaaaaatcacctgaaagctgaaaaacaaatcgcggaaagatccgtcaccgtcttacaaaacaaaaaccgcacgctcccattcaaaccgaaaaagaacagccgcgttctcattgccgctccttatgaagatcaaacagcggcaatggaacaaaccattcggcagctcatcaagaagaaaaaaatccggccggtaaccatcagtaaaatgaacttcgccgagcgcacatttcatgatgaacacaaaaagctggtatccgacgcggattacgtgattacaggctcctatgtcgtaaaaaatgaccctgtcgtaaacgacggcgtgattgacgattccgtcacagatcccggcaagtggacgaccgcatttccgcgggccgtcatgaaagccgcacaatcgaaccaaaaaccctttgtgctgatgagcctgcgtaatccttacgacgccgcgaattttgaagaagctgaagcccttatcgcagtctacggctttaaaggatatacagacggacaattcctccagccaaacattccggcaggcattgaagcgatattcggacagacaacaccgcaaggcaggctgcccgctgacattccttcagtcacgcatccgggaacgacactgtatccttatggtttcggtatcaatctgaagaccggaaaaccgctttaaacaggagggctgattatgaaaacacatacggctgcacttctcgccggacttgtcgtcatcagtgctatgacggcagtctcggcggcttctgacagaaaccttcataccgccaagaaaccaagcatccaaacaggcatcgaccgcctgctgaaagattataaacaggaactgaagggaaaaagggtcgggctgatcaccaacccgaccggtgtgaacgcatcattgaaaagcagcgttgacgtgctgtatgaggcgccagacatccgcctgacggcattattcggaccggagcacggtgtccgcggcgatgctcaggccggagacaaagtcacatcctatatagacgaaaaaacagggcttcccgtctacagcctatacggggagacgaggaaaccgacgcctgacatgctgaaagatacagatgtgctgattttcgatattcaggatgtcggaacccggtactacacctacatttatacaatggcctatgccatggaagcggccaaagaaaaaggcattcctttttatgtcttggaccggccgaatccgcaaggcggacgaaatccggacggcccggttcttgaaccggattacgcttcatttgtcggactgtatccgatcccgctgaagcacggcatgacgatcggtgagcttgctcttttattcaataaagagtttcatattggcgctgacctcaccgtcgtaaaaatgaagcgctggaagcggacgatgacgattgaagataccggtctgccgttcgtcctcccttcgcctaatatcccgaccccggacagcatatttgcatattcggcaacaggactaatcgaaggcacaaacgtatccgaaggaaggggcacgacaaagccgtttgaacttatcggcgcgccttatatgaaaagcaccgagctcgaagaacgcctgaacagtctcaagctttcgggcgtcaccttcagagccgcttcattcatccccagcttctccaaacaccagggcaagctgtgccacggcgtacaagtctacgtaacaaacagaaacacatttgaagcggcaaaaacagggctctccattctgaaaaccatgcatgacttatatccgaatgacttttcattcttgccgacaggctcttttgacaagctgatcggtaacggctgggtacgcaaaaaaatagaaaaaggcgcttccattgaagacatcaccggcacatatcaacgccggctggaccaattcaaaactctaagaaaacaatacctcatatactgacaacattcgtgttacacgtgtaacattttgacgcatttcacatttccgctttttataggaaaacattcatttatttggtacaatttaaatgataactgttatcatttaaatgaatgtttcctaaaaggtggtttctcatgaaaaacacattattctttcagcccattgatatcatctccgtgaaaaaaacagccgaccttctgtcagagcatcagctcactgattcccccgtattgatctttcatgtgaaaggcgagggacaaattgatatcggaacagacagctttccgctgcagaaggaaacgctctacatctgtccttgtgatgagacattcaatattgcccctatatcgtcaggcggcatccatttgtatatcgtcagactccgtgttttctcctattcctcagatgatgaagcgatgcttccggataacggggaagacatcttccacggacttcagcaaatgaatttacaaacggttgatcatttgacaagccggcttcaatcactttctgaaaacgtgcgatcggcggatggattgcagaaaatgaaatataccgccgactttcagcagctgatgtacgacctttatgccgcaaaagtatgccatcaaaataatacgaaagcggcgatcgaacagacaaaacaattcatacatgctcagtccgacacaaaaatcacgctcacccagctcgctcatatggcgggaatcagtcccaagcattacagtgaaacctttaaaaaactatacgggcagagcgtaactgaatatatcacagacatccgcataaccaatgcgaaaaaactgatggccaaggcaagctgcaaactgcgggaaatcgctcatcaaatcggctaccaggacgaattttatttcagccgcatctttaaaaaacataccggcagctcacctacaagctacatgaaaaaaaggcgcacaaaaatggccgcgtacggaaaagaaacgatggggcatctgattcctctgcatcacgtgccttacgctgcggcgctgcacccgaaatggacggcctattattacaaacaattctcttccgatattccggtccacctgagcgcttaccgctataatgcaaattgggaagagaacctgcatacgctgtctcaagctgccccggacattattttcagtctcgattctgtcagtgaagaagaaaaacagcgcctgaatgacatcactgaagttttttatcttccggctcaagagaattggagagaccagtttcttcgcacagccgcatatctgaatgaagagcaggaagcgcggcactggcttaaaacttatcaaagtctcacccattcagcgaaagatgctcttaaacatgtgcggcaccagcggttcttatttgtccgtgtatataaagaaaatatgtacatcgcccataacaacagtattgaggaagtcttcttcggtgatttggactttgcctccgcaaaaccggaatcatttgctcctgacgaaaagatttccttggaaatgctggcggattgccaggctgactgcatcatgcttttcacttgtaaagaaccggaaacgcttcgctattttcagcggattcagcagtccgggatatggcagaaccttagtgccgtcagcaataaacgcgtgtttcccatttcatctgacccgtggattgaatattctccaagcggacatcagcggatgatcgagcaaagcatttccattttatccgaagatcgtccatggtaatgccggaaattatccatggtcttatccctattcattctctataattccaattgataatagttatcaattgaacaggaggaacaatagatgaagaaattggcattcgctttcatgattttgcttttggctttcacggccgcggcttgcggaagctcagaaacaactgatacagcaagtaaaggaaaggacgcttcttcagataaaaagaaaatcgaatatctcggaaaaacatatgaagtcaaagcgccgactgacaaaatcgccattacaggcagcgtagaatcaatggaagacgccaaattgcttgacgttcatccggcaggagcaatttctttctccggcaaattcccggaactgtttaaagatattacagataaatccgtatcaacgggggaaaaaatgcagccgaatatggaaaaaattcttgagctgcagccggacgtcattctggcatcaaccaaattcccggaaaaaacgttgaaaaaattgagcggcaccgctgaaacgatccctgtctctcatatctcatcaaactggaaagaaaacatgatgctgctcgcccagcttacagataaagagaaaaaagcgaaaaaaatcatcgcagattacgaacaggacctgaaaaagacaaaaacaaagatcaacagcaaagcgaaacagtcaaacgcgctggtcatcagaatcagacaaggcaatatttatatttatcctgaacaagtttatttcaactccacgctttacggtgatttaggcctgaaggcgccggacgaagtcaaagcggcgaaagcgcaggaactgatttctcttgaaaaattaagcgaaatgaaccctgaccatatcttcgtacaattttctgatgacgaaaacgcagataagcctgacgctttgaaagacttagagaaaaatccgatctggaagagcctgaaggcagtcaaaaaagaccatgtatacgtcaatacgattgatccattagcccaaggcggaaccgcgtggagtaaaatcagcttcttacaggttgcggctgacaaattgactcaagactaataaagagtaggtttttcacatgtatgcaaaacggcggacacacattattatcattgcttcaccgattgctattgttctgtcactgctcctttccgttttatacggcgcaaagcagcttgacatccataccgtgttctccgcattgctgcactttaatccggagaataccgaccatcagatcatatggcattcaagaatcccgagggctgccggtgctatgtttatcggcgccgcccttgctgtttccggagcgctcatgcagggaatcacacggaactatctggcctcgccttcgatcatgggtgtgtcggacggctccgcttttatcatcaccctttgcatggtattgctccctcaatcgacatccattgaaatgatcatctactcgtttatcggttccgcattcggcgccgctcttgttttcgggctggcctccattcttcccggcggttttaccccggtgcagcttgccattatcggaacggtgaccagtatgcttctcagcagtctgtcggctgcgctttcgatttattttcaaatttcgcaggatctcagtttttggtacagtgcgagactgcatcaaatgaaccctgattttttgaaactggccgtcccgttttttgcgatcggaatcattacggccatgattctcagcaaaaaggtcactgccgtatcattaggagacgacatttcaaaaagtctgggacagcagaaaagaaccatcaaactcatggcgatggcggctgttgtcatattgaccggaagctcggtggcgctcgccggaaaaattgcctttgtcggtttagtcgttccgcacatcacacgttttctcgtcggatcggactacagcaggctgatcccatgcgcgtgcattatcggcggcgtctttctgaccctttgcgaccttgcgagccgattcatcaattatccgtttgaaacgcctattgaagttgtcacttctatcatcggtgttcctttctttctttatttgattaaaagaaaaggaggggatcagcgtggtgcgtaaaatggcaggaatttatatcattctgattgctctcatattgctcgtaagctatttcagcatgacaagcggttctttttccgcaaagccgggtgaactgctcagtacgcttttccgcatccatccgaatccgcaatatgacattttgctgtttcagctgaggctgccgcgcatagtcatggctgctgccatcggactcggattggggatagccggagctgttattcaggccattaccaaaaacggtcttgccgatcccggtattttgggcattaatgcaggagccggagcgggaatcgtcacgtttatgcttctgtttcagggacaatctgaagcgacggcacttgcctctgcgatgggtatgcctgtcttcggcctcatcggaggactgatggcggccgtgctgatctatattttcgcctggcaccgggggcatctggaatcgggcagaattattctcgtcgggatcgccatgaattccggattcagcgcgctgtctttatttctatcattaaaaatggacccgcaggattatgagatggcgatggtttggaaaaacggcagcatctggtcggcaaactggatgaccattacggcaatccttccgtggctgatcttgttcattcctcttcttatggcgaaaacgtcattgcttgataccattcgtttcgatgaggacacggtgaaaagcctcggtgtttcaaccaataaagaaaaaaccattttgctcattgcctgcatcgctttgatcagcgcatgtgtaaccgcagcgggcagcatggcatttgtcggactgatcgcgccccatatttcccgcaggctcgccgggattgagcacagatactcattaccggtcagcggactggtcggtatgctcctcgtcatatccgccgactttgcgggcaaattgttctttcagccttcagaagtgccggcgggaattatccttgcaattctcggcgttccttatttcttttttcttctgtttaagcaaaaaaaggggatggacgcatgagaggcacccttacagaacacccgataaacggaagggaatgcactgtgtatcttcctccttcctattcggttcaaacaggggctttaccctgtgtgtacgtacttgacgggggttctttgtttttagaacagatagataagcttgaatcccaatttacgaacggaacacttcccgaattgattttcatcggcatcaaaccggctgacagactcgatgagtacacaccgtggcccgcgccttccctgagccctgcgtttcatgatttcggcggcaaagggaggctctttctcgaggagctgacaaatgtcattattcccactgttgaagatacgcatcacatttctgcgcatccggaaacgagaggactgatcggtgcgtcattaggcggactgttttcgatatacgcgatgctgcaaaagcctgaaatattcggcagaatcggctgtatttccggttccttctggtatgaaaaatcagcagattatgtccgctccgcacctttgcggccggcacggcagcgtatctttatgtctgtcggcagccgtgaagcagagcaaaaatgtaacatccaaaacaccatgatcggacaaaataaagacgtgtacaaaagcctgaggcaaaaaggcttttctcaatctcagctctcattcacgatcgaagagggcgccgtgcaccatcaagaagcgttcaaacgacaatttaattcagcactaagctggctgtacggaaaaaaccgctcacgtgactgagcggtttttttcatacttgatcacgaccggcttaagctcaaagcgtctcagcaaatagccgaacaaagcggcaaggatttgctgaaagagcatcccgatgacgaccggaaccgccacttgagacggaaagaaagacacggcgagaacggctccggcgctgatattgcgcatgccccccgtataaatcagagacacgatttcatcctggctccgcttcatcagtcttccgatcagccaagccacggcataacccgtcatggcaataaaaaataccgtgcctgcgatgcccgcaaatttgatatccacgtgcgtgacatacggcgcgatttccgaactgttaatggcaatgacaatcatcagacagatttttgaaaaaggagacagtgaccggcttatcgcctgagtccttaccggcggggaaaactggttgaccatcatccctgcgatggacggaatcaccaccatctccgccagccctttcatcatgccccacacatccatctgaacattcgccccggccaggacagacaggcttaatggtacgataaaaggagaaagtacggtatcaaccaggataatagacagcgtcaatccgacatttcccttatacatcgcagcccaaatcaaactcgtaattccggtcggaatcaccacacccataatcagccccgtcacagttaaagggtcaccgctgaaaatcagatggccgcttccccatgcaaaaacaggcatgaaaatatgcagaacaaacaatgccatgatcatcgggagcggcttctcgatactgcgcttcagcgattgaaaattggcactcagactgcccgtaaatgtaataaatgcaaatatccacggcacagcgccggccatccagctgatatgctgagataacagcacacccgccgccacactagacggagtcaaaagcggcatgattctccccaacacttggttcaacttctgaagccacatcatatgcaagtctcctatatacggttttcaagtctcattcattataacaatgcacaccggcaaatttaaccgaaaaaaagcccggatatattcatccggacttcacaaattctatgccatttgtttcattaaatctcggcttttctgatttaatccctttaattcagcctcaattccgtattctttacatttggcgacaatcttctcaagagcagccgctccagaatcatcccacacgtgggcatcagtcaaatcgatgataatccgtttcacgtcttcatcataaacgatggcattcatcagttcagacacggaagcaaaaaagatctgtcccgttaccttataagttctgacatctttctgttcggaatgtgacacaatcttcagcttagaaattttcgccgtaaaaaagatcgcgcttagcagcacacccgcgaaaacacccttcgataaatcatttgtcagaacgaccgtcacgacggtaatcaccataacgatcgaatcagtaaggggcgctttccgcaaacctttaatcgatgaccagtcgaacgtgccgatggacaccataaccatcacggccacaagcgcagccatcggaattttcacgacgataccgcttaatacggcaattaaaaacattaaaaacgctccggccgtaaaagccgacaaccggccgcgaccgccggctttcgtattaatgacagactggccgatcatggcgcatccggccatgcctccgaaaaacccgttcacaatattggcgatgccttgtccgcggctttctttgttcttatcactatccgtatccgtcatttcgtcaatgatctgggccgtcagcaatgactcaagcaatccgacgaatgcaagcgccagtgaatacgggaaaataatccgcaatgtctcaaacgtccacggaacatccggtatcaagaaatgcggaagtgaacttgtaatcccgcccatatcaccgaccgtgcggacatccgcatggaagaccaccgcaatgatcgtcatgacaataatcgccaccagcggagacggcacagccgtcgtaaccttcggcaaaagatatatgatagccagtgatccgacaagcatggcgtacatgacccatgaagctcctttgaactgcggcagctgcgcagaaaaaatcaagatcgccaaagcattcacaaatccgatcatgaccgaacgcggaataaatttcatcaatttcgctatcttactgacaccaagaataaattgaataatacctgtcaaaatggttgccgcaaacaaatactgcagcccgtaatcagccaccaatgtcaccatgacaaccgccattgaacccgtagcggctgaaatcattcccggtctgccgccgaagatagaaataataatcgcgatacaaaatgatgcataaagcccgaccatcggatcaacacctgcaataattgaaaatccgatcgcctcagggatcagagcgagagcaaccagaataccggccagaatgtctttacggacattcccgaaccattgctgctgtaacgtataatctttcaaatgataacgactccttttcactataaaaatccgcaccttatcagttggaaacattgatttttatctggggaatatgaggcaagcttacggggaaaaggggacacgctcagagtataatgtcttgaggaaaggaatggttaacaaagagtatcatattaaactttaaagaaatgtgcaagaccgtataaaaaagaaaagaaaacggctctcactggagccgtttccgcttttataaaagttccggatcagacacaagaatcgtttttattgcgctgatatcctttctttcttttgtcaccgggtcgatgcccatgagatgatcaatggcttcttcataattcttcagttccgtcttttccgtaataaaatcatagagctgcggaaggtcggatgcacatgctaacgcagcctccatgatctgacgggcttcacctgtgcccacaatcgttacgccgtttgacagcagctgatacggcctgactgtcatctcatacgtatcatcaaagcccatcggcacgattctgcctcccttttcaataaaaggataagcccaatcaagctgattgccgatcgcgtcaaaaattacatcaaattttcttccttgattaatccgtttcacttcatccacggttaatgcttcagggtggtagacataatccgatatccggctcgccgcctcgcttcggaaactgcctatttcagtcgcaaccgtcaatcgcgccagttttttcaccatcatttgcacaagcagtccgattggccccgaccccaaaaccaagaccgagtcctccggctgaatcgaagctttgtccacaacattcagcacacaggagagaggctcaaccaatgtggcccgctcccattccattgaatcgggaattctgtacatgaacctgtcttctccgacgtaatattccgcaaacgttccgtgcgccccgattccgagctgccaatcctcgaaggtttcgcaataacacgtcagccctctccggcaataatgacatttcccgcaaaactgcgtaggatctatcacgacgcggtctccgacttttacatttgtcacgtccggtccgatttccacgaccgctcccaccgattcatgccccataatcatatgatgggttgcattcatttttcctttcagcacatttaaatccgttccgcagataccggtgccgaaaattttcactttcacatcattggatttccgaatttgaggctcgtccacctcttgatattcaagcttatcattaggagtccagaccaacgccttcatatttctcttcctttctgccccagcggatttggtctaacaatgtttgatgaagctccttcgttgatgccgcaatacatgattgctggttctgataacttaaatctgtcagaagcgtttcgtccaaagaccggccgtatgcatccgtaatgaccactcctgctttcttcgccaaaaagacgcttgcggcaatatcataaggaaacaaatgcagcacctctccgtttccgacctgctgaaaatctgaaagcagcttcggatcatctttcagcagacgattgccgatatccacataagcatccatctgccccgtgataattcgtgaaatcgaataagaagcgctgttgaaaacaaaaaccccgccattattggctgaccggtcaatcagatgaccgtatgcatccgtcatcagctgtgccggatgcccgttaaactcaaggctccaaaacatatttttaatatcccgcacttcgctcaaattcggcaattctccctgatacccctcaaactgaatggcgtcgctgtaaatatcaccgtacatgtaagcgcccgatttcaattcaagcaaaaaagcaaattcgatatccttaatctttgcgtttggcttatacgaagcaagcgcaatcgaaatacacgacatttcaagccccgcggcggccggacgcgttccgtctatcggatctacaattaaaatatattgcggatcttctccaatcagcttcaggccgccatcctccgtgtaaaaagcaaccggatggcccttatcttgaatataatccagcaccgcctcctcagcagcggcgtctatgttaaattgggcgtcgcctcccggagaatagccgtttacgagccggtttttcagcgtgcctttttgacttttcaccttatgataaacaaattgtccaagcccgatgatatagtctctcacttgatttcctccaatagcttgcgaagtctgtagcagagcacttctgcttcactaagtgtaatagttaaaggcggtcggattttaaaaacatttccgaacccgtaacgggatgtccggagaatcagcccgtaatccattgcccgttttgcaatataattggtcagctccacatccggttcattgttctcttttacaatctccacaccgatcataagaccgacgcctcttacctcagaaataaaagcgaaatcctctttcatcgtttctaagcgatccataatataatgaccgaccgtcgttacattttccaaaaatcccggacgctgcatgatatctatggttttacacgcggcagcggcggccatcacatttgagccgtacgtgaaggagtgcgtataccccggaagcccggtatacttgtcctccgtcagagtggcggcgacttggaagcctgtgcccccgagcccttttgctaccgtcatcatattaggtttcacatcgaagtggtccgcggcaaacattttgcccgtccgtccgaacccggtctgaatttcatcaaaaatcagggcgatatcgtgttcatcacaaagctgtctcagctgtttaaaatactctttaggcggaacgacgtttccaccgtttccggatatcggttcaataatcatggcggcaatttttccattgctcgcatactcaataaaatcattaattctttctacgcacagcataccgcatgaatcaggtttctgattataaaaacagcggctgcaatacggatcggggacttgaaggccaaaagaaatttgcggcgggaaaggttcttttctgaatgagttgccggacaaagcggaagtcatatacgtttgtccgaggtggcttcgaaataaggagatgacatcggtttttccggagtaatactgagccattttaatagctccttcatttgcaccggaaccgctgctgactttagggtgtacttttgtgagattatcgggggcgatttctactagtttttctgccagtttatttacggcgtctgtttgaaaagatgatgtcacatggatcagcttatcggcttgttctttaaccgtatcaatgacttctttgttaccgtatcctaaattcaagttaaatgtggcagaagcgcaatcaatgtactcattcccctcttgatcgtacaggtaaatcccttctccgcgctccattactacatcgtcaacactgtaatacaagctgtctggattcgtgatttccttcgttcccacaaataccacccctatgaaattattagaatttcgctttttatcgtattaattattgaaaatattgtcaacgatctttcttgtaaaaaatgttaacaatttgttaacgttaccataagggatgtacgagaaaaagttatgtgatatagtaacaatacttggattttttgtaaaaacgtcatgtcatacgagtagagagaaatattattttacgaataaggagataaaatgatgaaatctcgtctgctgtggataagctgtttttcttatggatcgattgcttttacacttgttattctgggagccgtactgcctgagttactcacacattattcacaaagctacagtaatggcggtgtattggtattctctcagttcatgggctttctcatcggtgttattggcatgccatacatggtgaaaaagcttgggcgcaaaaacgtcgttatctttggcctggcactcatcagctgcgaaatgttcatcaccttcctgccgccctggccgctgctctttcttctcgtcagcatcgcggggcttggcgccggattggtggaatcctgtgtaggcacgatcatcctcaccgctattaaagaaagacaggctgtggccatgagcaagatggaagtggcctacggattaggcgcgcttttcatgcctctgctctcaggctttcttatcaacaaccacatgtggacaattgcttttttagtattagggttatccagttttgcacttttaatcgcatggaagcagatgagtttcggcagtattgatcagcttctcatccgaaaagaggtctcttccgatgacactaaaaaagaaagcaccggttatcggtcacacggattgctgtttattgccttggcgggggcttacttcttcttttacggaggcagtgaagtttcaattgtacattttatcccctccattttctctgagaaatgggatatccccaactctttggcaacgataacagttacagtgtattggacggggatgatcatcggaaggttactaacaggcccggtatcagaaaagctgacatatcaccgttatcttcgtctcataagcattggcggtctggcagcacttaccgtattagcactaagtaaaaacgtatggttcggctttgccctttgcttctttttagggctgttcatggcaggcatgtttgcaatagccctaatcatcacgaatcatttttatcccggaaagacagaaacgactaccagtattctgctcgcttcaaacggattaggaggttcactccttccgatcgccgtcggctggagcttagatgaatatcccgcacaaactgcgttctggctgtttactgcactgatggtccttatgctgctgattgtgttcagtttaagaatactcgagacaataaaatcaaacaatcttcaaaatcacaacagcaaagcaaaatcaatgtaaacaaaaaagctaatgcctttgaaaggcattagctttatatatctatgtgatctttcaaataaaaaaaccagttcatcatgaactggtttaagacagcttggcggcgtcctactctcacagggggaaacccccgactaccatcggcgctgaagagcttaacttccgtgttcggcatgggaacgggtgtgacctcttcgctatcgccaccaaaccattgagagtgttctctcaaaactagataacagtaagcatacattcaaattggttaagtcctcgatcgattagtatctgtcagctccatgtgtcgccacacttccacctcagacctatcaacctgatcatctttcagggatcttacttccttgcggaatgggaaatctcatcttgagggggcttcatgcttagatgctttcagcacttatcccgtccgcacatagctacccagcgatgcccttggcagaacaactggtacaccagcggtgcgtccatcccggtcctctcgtactaaggacagctcctctcaaatttcctgcgcccgcgacggatagggaccgaactgtctcacgacgttctgaacccagctcgcgtaccgctttaatgggcgaacagcccaacccttgggaccgactacagccccaggatgcgatgagccgacatcgaggtgccaaacctccccgtcgatgtggactcttgggggagataagcctgttatccccggggtagcttttatccgttgagcgatggcccttccatgcggaaccaccggatcactaagcccgactttcgtccctgctcgacttgtaggtctcgcagtcaagctcccttgtgcctttacactctgcgaatgatttccaaccattctgagggaacctttgggcgcctccgttaccttttaggaggcgaccgccccagtcaaactgcccacctgacactgtctccccgcccgataagggcggcgggttagaaggtcaatacagccagggtagtatcccaccgatgcctccaccgaagctggcgctccggtttccaaggctcctacctatcctgtacaagctgtaccaacattcaatatcaggctgcagtaaagctccacggggtctttccgtcctgtcgcgggtaacctgcatcttcacaggtactataatttcaccgagtctctcgttgagacagtgcccagatcgttgcgcctttcgtgcgggtcggaacttacccgacaaggaatttcgctaccttaggaccgttatagttacggccgccgtttactggggcttcaattcgcaccttcgcttacgctaagcgctcctcttaaccttccagcaccgggcaggcgtcagcccctatacttcgccttacggcttcgcagagacctgtgtttttgctaaacagtcgcctgggcctattcactgcggctctctcgggcttgcaccctaacagagcaccccttctcccgaagttacggggtcattttgccgagttccttaacgagagttctctcgatcaccttaggattctctcctcgcctacctgtgtcggtttgcggtacgggcacctctcacctcgctagaggcttttcttggcagtgtggaatcaggaacttcgctactataattcgctcgccatcacagctcagccttcacgggaaacggatttgcctatttcccagcctaactgcttggacgcggatatccaataccgcgcttaccctatcctcctgcgtccccccattgctcaaatggtgaggaggtggtacaggaatatcaacctgttatccatcgcctacgcctttcggcctcggcttaggtcccgactaaccctgagcggacgagccttcctcaggaaaccttaggcattcggtggaggggattctcacccctctttcgctactcataccggcattctcacttctaagcgctccacaagtccttccggtcttgcttcacagcccttagaacgctctcctaccactgttcgaagaacagtccgcagcttcggtgatacgtttagccccggtacattttcggcgcagagtcactcgaccagtgagctattacgcactctttaaatggtggctgcttctaagccaacatcctggttgtctaagcaactccacatccttttccacttaacgtatactttgggaccttagctggcggtctgggctgtttccctttcgactacggatcttatcactcgcagtctgactcccaaggataagtcatcggcattcggagtttgactgaattcggtaacccggtaggggcccctagtccaatcagtgctctacctccgagactcttaccttgaggctagccctaaagctatttcggagagaaccagctatctccaggttcgattggcatttcacccctacccacacctcatccccgcacttttcaacgtgcgtgggttcgggcctccattcagtgttacctgaacttcaccctggacatgggtagatcacctggtttcgggtctacgaccacgtactcaattcgccctattcagactcgctttcgctgcggctccgcatcttctgcttaaccttgcacgggatcgtaactcgccggttcattctacaaaaggcacgccatcacccgttaacgggctctgactacttgtaggcacacggtttcaggatctctttcactccccttccggggtgcttttcacctttccctcacggtactggttcactatcggtcactagggagtatttagccttgggagatggtcctcccggattccgacggaatttcacgtgttccgccgtactcaggatccactcaggagagaacgaagttttgactacagggctgttacctcctatggcgggcctttccagacctcttcatctacctcgttcctttgtaactccgtacagagtgtcctacaaccccaagaggcaagcctcttggtttgggctggtcccgtttcgctcgccgctactcagggaatcgcatttgctttctcttcctccgggtacttagatgtttcagttccccgggtctgccttctcatatcctatgtattcagatatggataccactccattacgagtggtgggtttccccattcggaaatctccggatcaaagcttgcttacagctccccgaagcatatcggtgttcgtcccgtccttcatcggctcctagtgccaaggcatccaccgtgcgccctttctaacttaaccgttaaaaagaatcactacgtgatatcttgcattactaattgaatgtgaattacttctgttatctagttttcaaagaacaacatctcgaagaatcgaatgatccttcaaaactaaacaagacagggaacgttctgtttataagacccgaggtcttatattccgttaaaatccttagaaaggaggtgatccagccgcaccttccgatacggctaccttgttacgacttcaccccaatcatctgtcccaccttcggcggctggctcctaaaaggttacctcaccgacttcgggtgttacaaactctcgtggtgtgacgggcggtgtgtacaaggcccgggaacgtattcaccgcggcatgctgatccgcgattactagcgattccagcttcacgcagtcgagttgcagactgcgatccgaactgagaacagatttgtgggattggcttaacctcgcggtttcgctgccctttgttctgtccattgtagcacgtgtgtagcccaggtcataaggggcatgatgatttgacgtcatccccaccttcctccggtttgtcaccggcagtcaccttagagtgcccaactgaatgctggcaactaagatcaagggttgcgctcgttgcgggacttaacccaacatctcacgacacgagctgacgacaaccatgcaccacctgtcactctgccccgaaggggacgtcctatctctaggattgtcagaggatgtcaagacctggtaaggttcttcgcgttgcttcgaattaaaccacatgctccaccgcttgtgcgggcccccgtcaattcctttgagtttcagtcttgcgaccgtactccccaggcggagtgcttaatgcgttagctgcagcactaaggggcggaaaccccctaacacttagcactcatcgtttacggcgtggactaccagggtatctaatcctgttcgctccccacgctttcgctcctcagcgtcagttacagaccagagagtcgccttcgccactggtgttcctccacatctctacgcatttcaccgctacacgtggaattccactctcctcttctgcactcaagttccccagtttccaatgaccctccccggttgagccgggggctttcacatcagacttaagaaaccgcctgcgagccctttacgcccaataattccggacaacgcttgccacctacgtattaccgcggctgctggcacgtagttagccgtggctttctggttaggtaccgtcaaggtgccgccctatttgaacggcacttgttcttccctaacaacagagctttacgatccgaaaaccttcatcactcacgcggcgttgctccgtcagactttcgtccattgcggaagattccctactgctgcctcccgtaggagtctgggccgtgtctcagtcccagtgtggccgatcaccctctcaggtcggctacgcatcgtcgccttggtgagccgttacctcaccaactagctaatgcgccgcgggtccatctgtaagtggtagccgaagccaccttttatgtctgaaccatgcggttcagacaaccatccggtattagccccggtttcccggagttatcccagtcttacaggcaggttacccacgtgttactcacccgtccgccgctaacatcagggagcaagctcccatctgtccgctcgacttgcatgtattaggcacgccgccagcgttcgtcctgagccaggatcaaactctccgataaagtagtttgactgactacgcacatcgctgtgcgatttatttaaaactttgaattaacaggtacgttttgtcttgtttagttttcaaagatcattaccgcttgttgaagcagctttattatcttaccactcagcttcttttatgtcaacaactttttttaagttgtttccgaagctttttgttgttgtctgctgtccatcagcgacgtttaataatataccacggtgcttctctataaatcaagcattttttttaaaaagagaaaaaaagaaaaccagtatattatctttaaagcttgagaatggtcgggaagacaggattcgaacctgcgaccccatggtcccaaaccatgtgctctaccaagctgagctacttcccgattttaaaaaatattatggcgcgcccgagaggagtcgaacccctaaccttttgatccgtagtcaaacgctctatccaattgagctacgggcgcaatcaatttcacaatatcccgttgggataaaatggagcggaagacgggattcgaacccgcgacccccaccttggcaaggtgatgttctaccactgaactacttccgcaagtaaaagtgtaatacatggccagaatacagcttcagatagcggtaaaccgtattgttatttatactgttcattatgacaaaagtaattatatcaaggttttgataaaagtcaatatcgtttaacaattaattatgttaatctcttttgcatccttgaagaaaggcttcatcaggagacgcgctaaatacctacaccttaactggtacaatcagcaacaggtttttactgaactaaacaaaaaataacagttccataacattcggaaactgcttcagatcaacgtattttagataagcttccaagcgggctcgaaccgctgacctcttccttaccatggaagtgctctacctgctgagctatggaagcaatggctccgcaggtaggactcgaacctacgaccgatcggttaacagccgatagctctaccactgagctactgcggaatattataagcttcataaacaaaaacatggtagataaaataaaaagcttggcggcgtcctactctcacagggggaaacccccgactaccatcggcgctgaagagcttaacttccgtgttcggcatgggaacgggtgtgacctcttcgctatcgccaccaaaccattgagagtgttctctcaaaactagataacagtaagcatacattcaaattggttaagtcctcgatcgattagtatctgtcagctccatgtgtcgccacacttccacctcagacctatcaacctgatcatctttcagggatcttacttccttgcggaatgggaaatctcatcttgagggggcttcatgcttagatgctttcagcacttatcccgtccgcacatagctacccagcgatgcccttggcagaacaactggtacaccagcggtgcgtccatcccggtcctctcgtactaaggacagctcctctcaaatttcctgcgcccgcgacggatagggaccgaactgtctcacgacgttctgaacccagctcgcgtaccgctttaatgggcgaacagcccaacccttgggaccgactacagccccaggatgcgatgagccgacatcgaggtgccaaacctccccgtcgatgtggactcttggggagataagcctgttatccccggggtagcttttatccgttgagcgatggcccttccatgcggaaccaccggatcactaagcccgactttcgtccctgctcgacttgtaggtctcgcagtcaagctcccttgtgcctttacactctgcgaatgatttccaaccattctgagggaacctttgggcgcctccgttaccttttaggaggcgaccgccccagtcaaactgcccacctgacactgtctccccgcccgataagggcggcgggttagaaggtcaatacagccagggtagtatcccaccgatgcctccaccgaagctggcgctccggtttccaaggctcctacctatcctgtacaagctgtaccaacattcaatatcaggctgcagtaaagctccacggggtctttccgtcctgtcgcgggtaacctgcatcttcacaggtactataatttcaccgagtctctcgttgagacagtgcccagatcgttgcgcctttcgtgcgggtcggaacttacccgacaaggaatttcgctaccttaggaccgttatagttacggccgccgtttactggggcttcaattcgcaccttcgcttacgctaagcgctcctcttaaccttccagcaccgggcaggcgtcagcccctatacttcgccttacggcttcgcagagacctgtgtttttgctaaacagtcgcctgggcctattcactgcggctctctcgggcttgcaccctaacagagcaccccttctcccgaagttacggggtcattttgccgagttccttaacgagagttctctcgatcaccttaggattctctcctcgcctacctgtgtcggtttgcggtacgggcacctctcacctcgctagaggcttttcttggcagtgtggaatcaggaacttcgctactataattcgctcgccatcacagctcagccttcacgggaaacggatttgcctatttcccagcctaactgcttggacgcggatatccaataccgcgcttaccctatcctcctgcgtccccccattgctcaaatggtgaggaggtggtacaggaatatcaacctgttatccatcgcctacgcctttcggcctcggcttaggtcccgactaaccctgagcggacgagccttcctcaggaaaccttaggcattcggtggaggggattctcacccctctttcgctactcataccggcattctcacttctaagcgctccacaagtccttccggtcttgcttcacagcccttagaacgctctcctaccactgttcgaagaacagtccgcagcttcggtgatacgtttagccccggtacattttcggcgcagagtcactcgaccagtgagctattacgcactctttaaatggtggctgcttctaagccaacatcctggttgtctaagcaactccacatccttttccacttaacgtatactttgggaccttagctggcggtctgggctgtttccctttcgactacggatcttatcactcgcagtctgactcccaaggataagtcatcggcattcggagtttgactgaattcggtaacccggtaggggcccctagtccaatcagtgctctacctccgagactcttaccttgaggctagccctaaagctatttcggagagaaccagctatctccaggttcgattggcatttcacccctacccacacctcatccccgcacttttcaacgtgcgtgggttcgggcctccattcagtgttacctgaacttcaccctggacatgggtagatcacctggtttcgggtctacgaccacgtactcaattcgccctattcagactcgctttcgctgcggctccgcatcttctgcttaaccttgcacgggatcgtaactcgccggttcattctacaaaaggcacgccatcacccgttaacgggctctgactacttgtaggcacacggtttcaggatctctttcactccccttccggggtgcttttcacctttccctcacggtactggttcactatcggtcactagggagtatttagccttgggagatggtcctcccggattccgacggaatttcacgtgttccgccgtactcaggatccactcaggagagaacgaagttttgactacagggctgttacctcctatggcgggcctttccagacctcttcatctacctcgttcctttgtaactccgtacagagtgtcctacaaccccaagaggcaagcctcttggtttgggctggtcccgtttcgctcgccgctactcagggaatcgcatttgctttctcttcctccgggtacttagatgtttcagttccccgggtctgccttctcatatcctatgtattcagatatggataccactccattacgagtggtgggtttccccattcggaaatctccggatcaaagcttgcttacagctccccgaagcatatcggtgttcgtcccgtccttcatcggctcctagtgccaaggcatccaccgtgcgccctttctaacttaaccgttaaaaagaatcactacgtgatatcttgcattactaattgaatgtgaattacttctgttatctagttttcaaagaacaacatctcgaagaatcgaatgatccttcaaaactaaacaagacagggaacgttctgtttataagacccgaggtcttatattccgttaaaatccttagaaaggaggtgatccagccgcaccttccgatacggctaccttgttacgacttcaccccaatcatctgtcccaccttcggcggctggctcctaaaaggttacctcaccgacttcgggtgttacaaactctcgtggtgtgacgggcggtgtgtacaaggcccgggaacgtattcaccgcggcatgctgatccgcgattactagcgattccagcttcacgcagtcgagttgcagactgcgatccgaactgagaacagatttgtgggattggcttaacctcgcggtttcgctgccctttgttctgtccattgtagcacgtgtgtagcccaggtcataaggggcatgatgatttgacgtcatccccaccttcctccggtttgtcaccggcagtcaccttagagtgcccaactgaatgctggcaactaagatcaagggttgcgctcgttgcgggacttaacccaacatctcacgacacgagctgacgacaaccatgcaccacctgtcactctgcccccgaaggggacgtcctatctctaggattgtcagaggatgtcaagacctggtaaggttcttcgcgttgcttcgaattaaaccacatgctccaccgcttgtgcgggcccccgtcaattcctttgagtttcagtcttgcgaccgtactccccaggcggagtgcttaatgcgttagctgcagcactaaggggcggaaaccccctaacacttagcactcatcgtttacggcgtggactaccagggtatctaatcctgttcgctccccacgctttcgctcctcagcgtcagttacagaccagagagtcgccttcgccactggtgttcctccacatctctacgcatttcaccgctacacgtggaattccactctcctcttctgcactcaagttccccagtttccaatgaccctccccggttgagccgggggctttcacatcagacttaagaaaccgcctgcgagccctttacgcccaataattccggacaacgcttgccacctacgtattaccgcggctgctggcacgtagttagccgtggctttctggttaggtaccgtcaaggtgccgccctatttgaacggcacttgttcttccctaacaacagagctttacgatccgaaaaccttcatcactcacgcggcgttgctccgtcagactttcgtccattgcggaagattccctactgctgcctcccgtaggagtctgggccgtgtctcagtcccagtgtggccgatcaccctctcaggtcggctacgcatcgtcgccttggtgagccgttacctcaccaactagctaatgcgccgcgggtccatctgtaagtggtagccgaagccaccttttatgtctgaaccatgcggttcagacaaccatccggtattagccccggtttcccggagttatcccagtcttacaggcaggttacccacgtgttactcacccgtccgccgctaacatcagggagcaagctcccatctgtccgctcgacttgcatgtattaggcacgccgccagcgttcgtcctgagccaggatcaaactctccgataaagtagtttgactgactacgcacatcgctgtgcgatttatttaaaactttgaattaacaggtacgttttgtcttgtttagttttcaaagatcattaccgcttgttgaagcagctttattatcttaccactcagcttcttttatgtcaacaactttttttaagttgtttccgaagctttttgttgttgtctgctgtccatcagcgacgtttaataatataccatgcatcggctgaatttagcaagtatttttttcgtttttttttgaaacgtatttcgttatattcatctccgccgcggcatacgatgtaatcaagcatggacaagataaggaggcgtcaccagtgaaccacttctacgtgtggcacatcagaaggataaaacagctgcttattattatcattgccgcatttgcagcagccagctttttttatatacagagagccgtcccccttcctgtatttttaactgatagcggcccgaaggctatttcaaaaggggagacgaaagcgggcgaagtcgcattaacattcgatatcagctggggcgatgaaaaagcggttccgattctgaacgcgctaaaagcaaacggtattaaaaacgccactttttttctgtcagcttcttgggcggaacggcacccggacacagttgaacgtatggtaaaagacggacatcaaatcggcagcatgggatatgcgtataagaattataccaacctagaggacaacgaaataaaaaaagatatccttcgggcccagaccgcatttaaaaagctgggtgtgaagaatgttcatttactccgcccgccgaccggacaatttaataaaaaggttcttgccattgcacagcagtaccgctattcagtggttcattacagcgttaactcgcaggattggacaaatcccggtcctgataaaatcattgaaaatgtaaacagtcatataaaaggcggcgacattgtcctgctgcacgcctctgattcagcaacacagaccgaagaagcgctccccgccatcattcacaatttaaagcaaaaaggactgaaaaacgtgacagtcggcgacctgatcgcaaatactgacgtcaagtcatcagaagtgaaataactacctctgggcaaacttcggcagcattaacagctgaaacgcattgcagcccatcagcggaatcagcatcaaataaagccagtcctcattattcactcttagcgcaggaacccattcaagcgctgtaataacgaccattaaaaataatgatgaaacgaacgtattttttgaggactgcttttgttttatatacgccgtcagcaagccgacggcaagcagagccagcggcagccagacaaaccccgcaatcgagtcatcccgctcaccgaaaaacaaaaatctgacgtacattaaatcaaaagcgacaaacagaatgataaacagctgaagcagattccaaagcgagtttgatctgaggatttcaagggcaaaccggtgcaccgtcagaaagacgaagaatcccatctggctgatcacactgaaaatcatgcctaccccgataaaccagatcagaacggagaaaatttgaccggcctcaaaattcagaaagaacccttgtactccccccacttcagtgcaaatcccacgacgcttgtaataagagcgcccacagctaaaatcgaaaagaaaaatcgaacaagcccgcggcttttcatctcttattcatccccctgacaatcgcgttcagcgatattttgttatgtataaatccattccgatgaatcatattaaaaataagtacaagtaaggaaggagcttatgcatgtcaaaagccaaaacgctattgataagctgttttgttgtattatctgtaacagcttgtgctccaaaagaccaagcagcggatatggattatgaccagactaaaaaaatggttgttgatatattaaagacagatgatggaaaaaaagcaattaaggaaatattaaatgatgatgcgatgaatgaggcattggtgattgatcaaaatgccattaaaggcacaatagagaaaaccctcacctctaaaaaaggggcggagttctggaaaaccatctttgaagactcaaagttcgccgagagctttgcaaaaacgcttcagcccgagcacgaaaaaatcataaaaaaattgatgaaagaccctgattatcagaaaagttttatgcagatcatgcaggaccccggcatggataaaaaatactatgagctggtgaaaagccaaaagttccgcagttacttagaagatgtaattacagagacactttccagcccgcttttcaaaaagcaattcgaggatgaattgaaaaaagcggcttcaagttctgaaaaagaaagccaataaaaggccgggccgtgttgatcccggccccttttttattcagctgttttttcaatgactttttgggcgatacccatataaatttccccgatcggatgacttctgtcatagacagaaggcgcaaactggtccttgtcccaatcaggctgttttaaaggaattctgccaagcagcggcacctgcaattcctctgcaagcttatctcccccgccttgaccgaacacatattctctctcgccggtttttgcactttcataataagccatattttcaatgacccctacaacttcatgatcggtcttaatcgccatagatcccgctctcgccgctacaaatgcggctgtagggtgcggcgttgatacgataatctctttgcagctcggaagcatcgtgtgtacatcgagcgccacatcacccgtgccgggcggcaggtcgagaacgatatagtcaacctctccccagtcaacctcatggaagaagttattcagcatcttgcccagcatcggccctctccacacaaccggagcgttttcttcgacgaaaaagcccatcgacataacctttactccaaatctttcgacaggaagcagtttttctccttcaactgtcgggcgaactgtaatacccatcatgtccggcacgctgaatccgtatatatccgcgtcgatcaagccgactttttttccgagccgcgcaagagaaatggccaggttgacggaaaccgttgatttgccgacaccgccttttccgcttgccaccgcaagaaagaccggcggatgtttcctattcagcagggtttcgctttcagcagcaggccggctgaatttcgccaatgtttcttccggcagctcttcaaaccgaagtcccacagtttccgcacccgcttctttcagaacggatacgatttcctgctgaatgcccatctgttcagccgtccccgtttttgccaatgcaatttttacactgacatgccgtttttccggcttgacctttacttctttaatggcatccaattctcccagcggtctatgaagaaaaggttcgcgcatgtttccgactatatttcttacttcatcttctcttatcatcgaaccctcaccctttgtgtattcgtttacaaatggtattataccatatattaaacgtagaatcggcgaaaaaccctccttactcgggagggtctcctttttctgtaaaatatctcaacacgcccttatacacggaagaagcgattttgtcctgatatttaggctggccaagccttttcgcttccgcgggattggacagaaatccgatttccaccagggcgcccggtttggttacattctgcattaagtaaatgccgtgtatccgtttcgcctttctcgttgtattctccaaattgattctcaattcgtcctgtatatattttgccactttttcattctcttcgtattttccatagtagaagctttgggcgccgctccatctcggtgacggtatggcgttcagatgaatgctgatataaagctccgcctctgaacggttgatgatctccacgcgctttctcagatcttccgctttgcgtctgctgtagcctttcgtcccttcaggagctaaatcagtatccgtctcccgcgtcataatgaccaaagctccctgctcctgcaaatagtctctgaccctggaggccacttcgagagtaatgtccttttcaaggtgactgcctcccgtggcgcctccgtccggcccgccgtgtcccggatcgagatagatgattttcccgctcagcggcaggctccacggccgccatgaatcatcattatggaattgaaaccggaataaacacaataatatgataaagccaagtaaaaaaccgagccatttcagcttttttgtcatagctttccctcccgcttgtccccgttattaataagtatgggacaagggaagaaattatgattacctcatgcggagcttacattgtttttctctttgcagaaatccttccgtccaccagctgttgataaaccggcaggacgcttcatagatttctttttgttcaacggaagaatattgctcatgcgtccaattgcaaagatattcaaaaaaatcggccgtcagttcttcctcttcttcagccgaacgggcgttcgccctctgcaaagactcaccataaaatccaaagacgccgaaccggccgcctaataaatacgcttcaattgcaaaatctatgcatccttcactcagaatgccgttttcgtcttgaagaaagggaaacaaaggggtgagacatgcttttacggactgaatgatctgcgtcagtgacagctcctttagtaaactcttctcaagctcataatccttctgccgtttcacgtctgaaaaagataatacttctgccattgccagccacgctcctttttactgttattttgaaaggaaaagggaaaaagcatgctttgttgatagtggaaatcctcccaaatgaaggagtttcatgttaactggaagaataaagagctgaggtgacgtgatgaaaaagctgtttcaatacaattggacggtgcgtgacgagtggtttatgatatgtgaaaagctgagccgggaggaactgacgaaaacccggacgggcggaatggagagcatcttgcggactttatttcatatcattgatgtcgagatcagctgggctcgtgccattttaggtaaagatgatgttttacccgctgagtctgactatacgagcattcaggatctcagaaagctgtctgaacagtatcgggaggatgtcattcatgcggtctcccgcaaaggggcggatcttgttaagccggactggatggaccaaacctttcctaaagaagatattctccgccacatccttgcgcatgagattcaccacatgggacaactgtcggtttgggccagagagattggaatagaaccggtttcggctaatgtgatcagccgtccgcaggaaaaagccgcaaaaaaacagcacctctgacgggatgccgtttttatattttaatgcttcttgttacggagtatgtattaatgtattcatccagcacgaggccgcctttgtcctcgtaaaaaccggcaaccataaagcctgcgtcaatctgacctttaatttgatcctccagcgtatggccgaattcaagcgcttcatgattatcaataagttcctttacctttttcttactcagatctttttcatccgaaaacggaatggaatactttacttttagtacgccttcctgctctaaatccatatcaaataagaacacgacgggatttacaaaaccggagactaaagacccgccttttttcaatacgcgataagcttctttccataccggaagaaccgtatcaacaaagcaattcgataccgggtgcacgataaaatcaaatgtctcatcatcaaaacagctcagatcattcatgctgcctttgacagtccgaagcgtaagaccgtcccgctgggcaaccattctgtcttgcgcaagctgtttttccgaattgtcaaagatggtgacgtccgctcctgcagcagcaaggaccggcccttgctgtcctcctcctgaagcgagacaaagaacctccagaccgtctatgggcggaaaccaatccgccggcacatcttttccgggggtcattctgatgctccaattgccttttttcgcttcaccaattgtatgagaatcaaccgcaaccgtccattcattgcctgtttcgacttttttatcccatgccttgctgttatgtatgactaacttattcattataactgcgctccttattggtaatgaatagagtataacaaacaattctagaaaaacatcggataacctcttcgatatgagaaaaaaatacaaaaaaaccacaaccaagaagttgtggtttttgccatccaaaacgattaacgttttgagaactgaggtgcacgacgagcgcctttaagaccgtattttttacgttctttcatacgggcgtcacgagtcagaagaccagcacgtttaagtgttgcgcggtattctggatctgcttcaagcaaagcacgagcgataccgtgacggattgctccagcttgaccagataagccgcctccatgtacgtttactaaaacatcataagtaccagctgtttcagttaaagttaatggttgtttgatatcttcgattagagccggagatggaatgtgctcgctgatttcacgattattaacgacgatacgaccttctcctggaactaagcgcacacgcgctacagaacttttacgacggccagtaccgtaatattgaacctgtgccaaattggtaacctcctttttaattaaccgcgaagttcgtaaacttcaggtttttgtgcttcatgtggatgctcagaaccacggtatacgttcaatttcttgaacatttgacgacctagagaaccttttggaagcatgcctttgatagcaagctcaagcattttctcagggtagtttgtacgcatttcaagagctgttcttgatttcagaccgcctgggtgcattgtgtgacggtagtagattttatcagttaactttttaccagttaactcgattttttcagcgttgatgatgatcacatgatctccagtatcaacgtgcggtgtgtaagtcggtttgtgtttcccgcgaaggatagatgcaacttctgtagaaagacgtcctaaagtcttgcctgctgcatcaacaactaaccacttgcgttcaatagtacttgcgttagccataggtgttgtacgcatttaattccctcctaaatgatctgtcattttttcataaacttctgttacgttctatttcacaacacaataagttccggggcttatcgtggggttgaaatacataccatatgatatcttataactttatgcagactctgtcaagaaaatgttacacctggtttagttgtcatagcaaacgctccataaatacagcccgtgccccggtgcggtgcgccccgcggcttcgcgatccttcgcttcgagcattgcttttacatcatcgggagaaaattttccagctcctgtatccaataacgttccggcaatgattctgaccatattatagagaaaaccgtttccggtgatccgcatctgcaggccgtctccggtctcagtccaatccagctcgtaaatcgttctgaccttatcctgaaccgcggtatcagccgcgcaaaagcttgtgaaatcatgtgtcccgatgaggtgccttgaagcttccctcattttctgcacattaagctgatatgcaaaatggtaagcgtaatgtcgtttaaatacgtccgggtgtttctccgtatatacaaagtagcgatattccttttggactgcgctaaatcgtgcatggaacccatcatccgcaatctctgctgttttgacggcaatatcatcaggcagcagggcattgagcgcaaacggccatttctcagccgggatggacagcggcgtatcaaaatgaataacctgcccggcagcatgaacatcgctgtccgtgcggcccgatgagatgacaggcaccctgccgtccgttttatggatgacggccagcgctttttccaattcactttgaacggtccgctttccaggctgaacctgatatccgttaaataaatgcccgtcataagcaatggtacatttcactctcattcagcagcacctctaacttcttaagaaaaacaataacacggctaatacgatgatgagcagaatggctccggtatcctttccggtccagacgagctttctgtatttcgttctcccctcaccgccctggtagcctctcgcctccatggcgaccgcaagctcttccgcgcgtttaaaggcgctgacaaacagcgggacaagcagcggaacaaccgctttgattctgtctttcaccgggccgcttgtaaagtccgcacccctcgccatttgcgccttcatgattttatctgtctcttccatcaatgtcgggataaatcgcaatgatatcgacatcatcaatgcgagttcgtgtacgggcagcttcacctttttaaaaggattcaagagctgctccattccatccgtgatttcaatcggcgttgttgtcagcgtcagcagcgttgtcataaagataaggtaaacgaaacggagggagataaaaatcccctgtataagtccgccctcatacactttaaaccagccaagctgaaaaatgacagatccttcatgcgtcatgaaaatgtgtaataaaaaggtaaacgccacaatccagataatcggcttaagccctttcagcaaaaagctgaacggcactcgtgttaaggcgatcaccccgaatgtaaacaaaccgagcaaagcatacgtttgtacgttgtttgccaaaaaaacgatacatacaaaaagaaagatgctgacaagttttgttcgcgggtccaatcggtgaataagcgatgatccgggaacatactttccgataatcatgctgtccatcattggtccttttcctcctgaaagaaagccttaatttcgctcgcggcatcctgcagggtcagcatgggtttttcatacttaactccgagagcctcctcaagccgtctctgaaacttcaccgactcaggaagatccagtcccatttcggccatctcttcaccttttacaaacaagtcacgcggactccccgtcgctttaatggtgcctttgtgcatgacgatcatttcgtcagcatagcgggcggcgtcctccatgctgtgggtgacgagaacggtagtcaggtttccccgctgatgaagcgcatagaacatgtccataatgtcctggcgccctctcggatcaagaccggctgtcggttcatccaaaaccagcacttccggctccatcgcgagaacgccggcaatcgccactctgcgcatctggccgccgctgagctcaaacggtgaacgatccaaaatgtcttccggaaggcccacaagccccagcatttcttttgctttccgttcagcgtcttctttttttacaccgaaattcatcggtccgaatgcgatgtccttcagcacagtctcttcaaacagctgatgttcgggaaattggaaaacgattccgactttttttcgcagagtcttaaggtctttattctttttaccggctgccagaatcgtgctcccgagctcaagctgtcctttagtcggtttcagcaaaccgtttaaatgctgcaggagcgtcgatttgcccgaccctgtatgtccgatgacggcaacgtagctgccctcttttatcacggcattgatatcatacagagcaagccgttcaaacggtgtcttcatttgatagcggtgttctacatctttgattttaatgtccacagctcattcaccagcccttcctgagtcagatggtttttcgttaacgccagtccgctttctttcaaaagcaggctgagctggaatgagaaaggcaaatcaagaccgatgcgaaccaagtcttcatttaatttaaaaatctcttcaggcgtgccctctgcatatttcctgccgccgttcatcacaatgatcctatccgcccttgcggcttcttccaggtcatgtgttatcgaaatgacggtggccatgccctgatcttttaagcgtctgacagtatcaaggacttcttctctcccaatcgggtcaagcatggatgtcgcttcatccaaaatcataatatcaggacgcgcggcaataattcccgcgatcgccactctttgtttttgacctccggagagatggtgcggctcttgatcaagaaaatcctgcatattgacttgtgtgacagcccaatctactctctcaatcatttcttcgcgcggaacaccattgttttctaaaccaaaagccacatcatcgcgaacagtcgttccgacaaattggttatcgggattctgaaagaccatccctattttttttcgcacatcccacacggtatcctcagtcagcttgatgccgccgacttcaatttctccggcctcaggcaaaatcagcccgttcagcgctctggccaaagtcgacttccctgaaccgttgtgacctacgatagcaagccattctccttcatatacctccagactcacaccgtccagcgccggtcttactgcatctttgcggtagcggaatagaatgtcttttacggatataagctgtttttgatccacgggcgcctgacctcctctcagctatagctctgcttttctgtctcatgataaaaagttctgatatctaaaaaaagggcatagatccagttagaaactgtcccgcccttctttagatacacaaaaatatgtgattaaaccaattcgatgattgccattggtgcaccgtcaccacggcgaggaccaagcttcataatacgtgtgtatccgccttggcgctcctcgtaacgagttgcaatgtcagagaataatttttgaagtgcatcttggttattttcttcattagcaacctcgttgcgaatgtatgcagcagcttgacgacgagcatgcaagtcaccgcgcttaccaagagtgatcatcttttcaacaacagagcgaagttctttcgcacgtgtttcagttgtttcaattctttcgttgatgatcaaatctgttgtaagatcacgaagcatagctttacgctgtgaactcgtacgtcctagttttctgtatgacatgtgatgtcccctcctttaatggaatgctgtttctaattaaaaaacacacgaaaatcctagttcacatggaaactagatcaatcgtctttgcgaaggccgagtccaagttcttcaagtttcgctttcacttcttcaagtgatttgcgtcccaggttgcgaactttcatcatatcttcttccgtcttgttcgcaagttcttgaaccgtgttaatgcccgcacgcttcaagcagttgtaagaacggacagaaagatcaagttcctcaatcgtcatttcaagaactttttctttttgatcctcttctttttcaaccatgatttcagcatgctgagcttcgtcagttaaaccgacgaatatattaaggtgttcagttaaaatctttgaaccgagagcaattgcttccttcggtccagtgcttccgtcagtccaaacatcaagtgtaagtttgtcatagtttgcaacctggcctacacgagtgttttctacctgataagataaacgagaaactggcgtaaagattgaatcgatcggaatcacgccgattggctgatcgtctcttttgttcgaatcagcaggtgtatacccacgtcctctttgtgcagtaaggcgaactcggaaactcgcattctcaccaagagtcgcgatatgaagatccggattaaggatttcaacatcgctgtcgtgtgtaatatcagctgctgtgacagttccttcgccctgtacatcaatttcaagcgtcttctcttcatcagagtagattttcaatgcaagctttttaatgtgcaagattatcgttgtaacatcttccacaacgccttcgattgtcgagaattcgtgcagtacaccatctatctggatcgatgttacagcggcaccagggagtgaggataagaggatacgacgtaaggagttacccagagttgtaccatatccacgctcaagcggctctacgacaaacttaccaaatttggcatcgtcgctgatttcaaccgtttcgatttttggtttttcaatctcgatcattacttaaaaccctccttcaaaacgtcgaaacctcgaatagaatcatatgagattccatccgaaattccccattgtttagtcccgtatgtgctcaggcaacgagtcggtgcattcgtttcataaataactgtatcataacccattattgacagggacacaaaatctatacaaacaaattacacgcggcgacgttttggtggacggcatccattatgaggaacaggagttacgtctctgatagctgtaacttcaagtccggcagcttgtaaagcacggattgcagcttcacggccagaacctggtcctttaacagttacttcaagagttttaagtccgtgttcgattgaacctttagcagctgtttcagcagccatttgcgcagcaaaaggagtcgatttacgagaacctctgaatcctagagctccggcacttgaccaagaaatagcattaccatgagtatcagtgatcgtaacgatcgtgttgttgaaagttgaacgaatatgagcgattcctgactcaatattctttttcacgcgacgtttacgcgtgttttgtttacgagcagcagccattgtttaggtacctcccttacttattttttcttgttagctacagtacgacgcggacctttacgagtacgcgcattgtttttagagttttgtccgcgaacaggcaaacctctgcgatggcggattccgcggtagcttccgatttcgatcagacgcttgatgttaagagaaacttcacggcgaaggtcaccttctactttcagtttgtcaataacatcacggattttaccaagttcttcttcagtaagatcacgcacacgagtatcttcagaaacaccagcctctttcaagacttgctgagccgttgtgcggccaattccgaagacatatgttaaagaaataacaacacgtttgtcacgtgggatatctacaccagcaatacgagccattctctgggcacctccttattaattatccttgtttttgtttatgctttggattttcacagatcaccattacttttccttttctgcgaataactttacatttctcgcagattggtttaactgatggtctcactttcatgtgtttccaacctccttcagtttccggagtgctttatttgtaacggtacgtaatcctgccacgagttaagtcatatggagataattctaccgtaactttgtctccaggtaaaatgcgaatgaagtgcatgcggattttaccagatacgtgagccaaaaccgtatggccattttcgagttcaactttgaacatcgcgtttggcagtgtttcgacaatcgtaccttccacttcaattacatcgtctttcgccattcaagtgttctcccttcttcaaatcagtaacttgctctctgacaaatttcaaaagagaaaatctcagttatccgtttgtcacacgccctgtttcgtttatactgttctgaacttccggagatacgcaatcataaagggtgaatgattgatattctttttctaaggagaatgaaatgtacgcttttctccgtctgctttagtacacgatgatgaatcttccttccgatgacagcagctagccggtttttcttccgaccaattgtaaacctacaatctgcccaggtgcggaatgaaaaacatgtgtcatggaattcatttcatcatctagacttttgtcagtatatcaaaacccgtttccgtaatcgcaatcgtatgttcaaaatgagcacactttttcccatctaccgttacaaccgtccagttatcagccaatgttttcacataccggctgccagcgttaaccatcggttctatagcgagaaccataccaggcttcagcctaggtcctttgtttggcggaccgtaatgaggaatttgcggatcctcatgcaagtcttgaccaacaccatgtccgacatactccctaacaactgaaaactgctcattttcgacatacgtttgtattgcgtgggaaatattcgacaaacgttcacctggttttgcttccttcaagcctttatataaagactcctctgtcacttccagcagtcgtttatcatcatcactgatgtttcctaccggatatgtccaagcagagtcaccatgataaccatttaatttagcaccgatatcaatgctgataatgtcaccgtcacgcaaaacccttttaccgggaattccgtgaacgagttcttcattaactgatacacagatgctcccgcgaaacccattataccccttaaaagatgggattgcaccctgcttctcaataaaacgttcggcaatttgatccaattcttttgtcgagattcctggtttaatgtgctttttcatctcttcatgagtcaaagccacgattcgccctgcttcccgcatgatgctaagctcacgaggggtcttacagataatcatttgctcaatcctccaagaagctctttcacatctttgtacacgtcgttaatgtcctgctggccattgacgttgacaagataccctttctcagaataaaaatcgagtaaaggctgagtctgcttcatgttgacctcaagccgttttgagacggtttcctcattatcatctgcccgttgataaaggtctcctccgtctttatcacaaacacccggcgttttcggcggattgaaaaccaaatgataggttgtgccgcaaacactgcaaattctgcgtccagtcaaacgttccattaaagagtctttgtctactttaatgttaatgacataatcaatcggcttgccgtattcctcaagaatgttttcaagagcttcagcctgagcgactgttcgcggaaatccgtccagaagaaaacctctttcacaatcatctttgccgagtctttctttgacaatgccgattgtgacttcgtccggtacgagctcgcctttatcaatataagactttgcttcgagtccgagtggtgtttcttctttcatagcagcacggaacatatctcccgttgagatatgaggtatcccataatcctcaacaattcgttctccctgtgtgcctttaccggctccaggaagtcccattaagactaagttcattcggatttcccccgtcctctcttatttagaggaatggttaaaaccagtcctctaatttttcataaatcctcggtaattacgtttcactaactggctctccagctgcttcattgtctccaaggctaccccgacgacaattaacaatgatgttccgccaatctgtgcactttgaggcaatccagcgaattgaatgaaaaagataggaagaatggaaatcacggctaagaatatagaacccacaaacgtaagtcgatacaaaatgctcgtaattctatcttgagtcattttccctggacgaacccccgggatatagccaccctgtttttttaggttatcagccatttgttcagggtttacctgcacaaaagcatagaagtacgtaaaggcgataattaatgcgacataaaccgtcatgcccaccggatgtgtattgtcaaagttggcttgaatccactttgtcacatcgttttctccgaaaaatgacgcgatagtacgcggcgtaataaggaacgcaaccgcaaagattaccggaataacccctgccggattcactttaagcggaaggtgagttgactggcctccgccaacaggtgaacgaccttgcccttttgcatattgaatcgcgattttgcgtacagcctgctgaatgaaaataacaccaacaataacggctaaaatcgcaatcaccagtaaagcgattttcacaatatgaataaacagctgatcgctgctgccgacaaattgagtctcataaatctgcccaacagttttcggaatactagccacaatccccgcgaagatgatgatcgaaattccgttacctactccattggaagtaatttgttctcccagccacattaaaaaagcagttcctccagtgagtactaaagcaataatcagatatgtcgatatgccggatttttcaatcagcataccgtttgccaggttgttaaacccgtaagacatacctaatgcctggataaaaccaagcacaatcgtaaaatatctcgtgaactgagctaatttacggcggccgacttcaccttgcttagaccactcggtaaacttcggcacaacatccatctgaagcagctgaatgatgatcgaagcagtgatgtaaggcgtaattcccatcgcaaaaatggagaactgataaagcgcaccgccgccaaatgtgttaaggagatcaaaaacccccatcgaactttgtgtctgcaacgcctgagcatttacatatggcacagggataaacgcacctatgcgaaagacgataagcatgagtaatgtaaaaatgattttattccgaatatcactcacacgcataaagttggagattgtcttaaacaagttagatcacctcagctgtaccgccagcagcttcaacagcttctttcgcagaagcagagaatttattggcttttacagttaattttttctctaatttaccgttgccaagaatctttactcctgcattaagtttgctaataacaccagtctcaagaagaagttcaggagtgacttccgttccttccgcaaaaccgttcaatttgtctacgttcacaatagcgtattccttacggttgatgtttgtaaaaccgcgcttaggaagacgttggaataaaggcatttgtccccctcgaatccagggcgtacaccgccgccagaacgagcgttttgacctttgtgacctttaccagctgttttaccgttaccagaaccaataccacgacctacgcgattgcgtactttacgtgaaccttctgaaggctttaattcatgaagtttcattaggacacctccttagcctataatttatttttattgttctttaacagaaactagatgagatactttattaatcataccgcggatcgcagcgttatcttcatgaacgacagtttggtttgttttctttaaaccaagtgttcttacagtaacgcgctgatcttccgggcgaccgattacactgcgtttgagggtaatttctaatttagccattaatgttccctccttatcctaacagttcttctacagattttccacgaagcttcgcaacctcttcggcacgtttaagctcacttaaaccttgaagtgttgcacggatcatgttgatcggtgtgttagaacctaaagacttagaaaggatatcagcaacgccagcaagctcaagtaccgcacgtacagggcctccagcgataactccagtaccttcagaagcaggtttcaacaagatattgcctgcaccgaaacgtccgatgatttcgtgtggaatcgtagttccaaccattggtacttcaatcaaattctttttcgcatcttcaacagctttgcggattgcttcaggtacttcttgtgctttaccagtaccgaaacctacgtgaccgtttttgtcaccgacaacgactagagctgcgaaacggaaacgacgaccacctttaacaactttcgctacgcggttaaccgtaactaagcgttcttctaactctaatttgcttgggtcaatacgacgcataatcatgtgtccctcctttttttattaaaatttcagtccggcttcacgagctgcatcggccagagcttttacacgtccatggtataagtatccgccgcggtcaaatactacgtcagaaacacctttctcagaagcgcgtttcgcaacgagttcaccgactttagcagcagcagcgctgtcaccagtgctttccacgttcaaatctttatcaagagtagaggcactagcaagtgtaacgccatttacatcatcgatgatttgagcataaatgtgtttgtttgaacggaacacattcagacgaggtctttcagctgtgcctgaaagtttagcacgaacacgggcatgtcttttttgacgagcagcatttttgctagttttcgtaatcatccttaggtcactcctttcttcactttaagcggtcttacttagcagatttaccttctttacggcgaacaacttcaccttcgtagcggattcctttacctttgtaaggctctggagaacgtacagcgcggatgttagcagcgatagctcctacacgctctttgtctgtaccttttacaactactttagtttgagaaggaacttcgatttcgatgccctcttcaggaacgatctcaacagggtgagagtatccaacgtttaaaacaagtttgtttccggatttagccgcacgataaccgacaccgactaattccaaacctctttcaaatcctttagatacgccttcaaccatgtttccaagcagactgcgagtcgtaccatgcagcgcacggtgctctttgtgatcagaaggacgagtaactgtaagcacgttgtcctcaattttgatttccatatcaggatggaaagtacgagttaattctccttttggtccttttacagctacagtgttgccttcgttcagcgttactgtaactccagaagggatctcaagcagttttttacctacacgagacatactaaaacacctccattcttgttaaacttcttaccaaacgtatgctagaacttctccaccagcttgttttgcacgggcttctttgtccgttaaaacaccttgtgatgtagaaataatcgcgattccaagaccgttaagtacgcgaggtacttcatttgatttagcgtatacacgcaaacctggtttgctgattcttttaagaccagtgataacgcgctcgttgttttgtccgtatttcaagaaaacgcggatgataccttgtttgctgtcttctacgaactcaacgtcacgaatgaaaccttcacgctttaaaatgtcagcaatttctcttttcaatttagaagcaggaatttcaagcttctcatgacgtaccatgtttgcattgcgaatacgagtcagcatatctgcaattggatctgtcataaccattatataattacctccttcccattcttggggattaccagctggcttttttcacgccaggaatttgtcctttatatgcaagctcacggaaacaaatacggcaaagtttaaatttacgaatgactgagtgcggacgtccgcagcgttcacagcgagtgtactcttgcactttaaactttggtgtacgttgttgtttcgcaatcattgactttttagccacgatttcgcctccctttcattgattatttctggaacggcatacctacttgagttaatagctcacgagcctcttcgtcagagttagcagtcgttacgataacgatgtccattccgcgaacctttgttactttatcgtagtcaatttcagggaagattaactgttctttgataccaagagtgtagtttccgcgaccgtcgaaagatttcttagaaatcccgcggaagtcacgtacacgcggtaaagatacagaaataagtttatcaaggaaatcatacatgcgctctccgcgaagagttactttcgcaccgataggcattccctcacgaagacggaatccagcaattgatttcttcgcacgagtaacgacaggtttttgacctgcgataaacgttaattcttcaacagcactgtcgattgcttttgcgttttgaacagcatcaccgacacccatgttgattacgattttttcgatttttggcacctgcataacagagtcgtagttgaacttcgtcattaaagcaggtgaaatttctttattgtacttttctttaaggcggttcatgagatagacctcccttcctttaaatactatttatctaagacttgcccagatttttttgcaacacgaacttttttgccatcttccactttgtatcctacgcgagtcacttcaccagttttaggatcgagcggcataacgtttgatacatgaattggcgcctcttgattagaaataccgccttgagggtttgcttgagttggtttagagtgcttcttcaccatgtttacgccctcaactagaacgcggtcctttttagggaaagcagcaaggatcgtaccttgtttgcctttatctttaccagagataaccattactttatcgccttttttcacatgcatcctgatcgcacctccttgagtaaggcatttatttcattagataacttctggagccagagaaacaattttcatgaagttgttttcacgtaattcacgggcaaccggtccgaagatacgagttccacgcgggctcttgtcgtcacggatgataacacatgcattctcatcgaagctgatgtatgatccgtcagatctgcgtgctccgctttttgtgcgaacgataacagctcttacgacttcaccttttttgacaacgcctcctggtgttgcttgtttaaccgtgcaaacaattacatcaccaatgttagccgttttacgtccagaaccgccaagaactttaatagtaagtacctcacgcgcaccggagttgtcagcaacttttaaacgagtctcttgttgaatcattatttgttacctcccttcggaaaaagaattccgaactttattagataataacagcttcttcgacaacttctactagacgaaaacgcttagttgcagataatggacgagtttccatgatctttacgatgtctccgattttagcttggttattttcatcatgtgctttgaatttctttgagtattttacgcgtttaccgtaaataggatcctttttgtatgtttcaacaacaacagtgatggttttatccattttgtcagaaacaacacggccttggtaaactttgcgttggttacgttcgctcatgctcacgacctcccctcagtgattatttgttggcagcaatttctctttcacgaatcacagttttcatgcgcgcgatagctttgcgcacttcacgaatgcgagcagtattttcaagttgtcctgtcgctaattgaaagcgaagattgaaaagttcttctttaagagactttactttttgttcaatttcagcagtggtaaggtcacgaatttcattagctttcatttgattcaccaccaatttcttcacgttttacgaacttcgttttaattggcaatttgtgagatgcaagacggagagcttcacgagctacctcttcagacacaccagaaatttcaaataaaactttgcccggttttacaacagctacccagccttcaggagcccctttaccggaacccatccgtacctcaagcggtttagcagtgtaaggttttgaagggaaaattttaatccaaactttaccgccacgtttcatgtaacgagtcatcgcaatacgtgcagcttcgatttggcggttcgtgatccaagaagcttcaagagcctggataccgtactcaccaaaatgtacttcagtaccgcctttagcgcgaccgcgcatttttccgcgatgctctctgcgatatttaacgcgttttggtaataacatattattttcctccttcctcagttttcttcttagtaggaagaacctctccacgatagatccagacttttacaccaagcttaccgtaagttgtgtcagcttcagatgttgcatagtcgatgtcagcacgtaaagtgtgcaatggaacagttccttcactgtagtattcagaacgagcgatatcagctccgccaagacggccggaaaccattgttttcacaccttgtgctccagcacgcatagtgcgttggatttgttgtttctgcgcacggcggaaagaaatacggttttctagttgacgagcgatgttgtcagctacaagctgagcatcaagatctgctcttttgatttcaagaatgttaatgtgtacacgcttgccagtaaggctgttaagggctttacgaagtgcttcaacttcagatccgcctttaccgattaccataccaggcttagcagtgtggatcgtaatgttaacgcggtttgctgcacgctcgatttctactttagaaacagaagcgtcagaaaggcgtttgctaatgaattcacgaatttttaaatcttcgtgcaggaagtcagcgtaatctttaccagcgtaccacttagattcccaatcacgaatgactccgatacgaagaccgactggatttaccttttgacccactacttatccctccttcttttctgatacaacgattgtaatgtggctcgtacgtttgttgatttggctcgcacgtcccatagcacgcgggcggaatctttttaacgttgggccttcgtcaacaaatgcctgagaaataaccagattgttagcgtccatctcgtagttgtgctcagcatttgcgatagcagattttaaaactttttcgatgatcggagaagcagctctcggagttaggttcaagatagatactgcttcgcctacttgcttacctcgaatcaggtccattactagacgtgctttacgaggagcaatacggactgttcttgcaacagctttagcttgcatttaaaagcctcctctcttagcgtcttgtttttttatcgtcactggcgtggcctttgtaagtacgagtcggtgcgaattcgcccaacttgtggcctaccatgtcttcagaaatgaatacaggcacgtgtttacgtccgtcatatactgcgatagtgtgaccgataaattgtgggaaaatagttgaacggcgagaccaagtttttacaacttgtttcttgtccgtttcatttaatttctcgatttttgtcatcaagtgtccatcgacaaatggtccttttttcaagctgcgagccattttggaacctcccttcgtgattgcactacggtccgaaatgaaccgtagacaaccccgttatttatttttacgacgacgtacgataaatttatcagatttgttctttttcttacgtgtcttgaatccaagagtcggtttgccccaaggagacattggtgatttacgtccgattggcgcgcgaccttcaccaccaccgtgcgggtgatcgttagggttcattacagaaccgcggactgtagggcggatgcctttccagcgagagcgtcctgctttaccaacgttgataagttcgtgctgctcgttacctacttgaccgatagaagcgcggcaagcagaaaggatcatgcgaacttcaccagagttaagacgtacaagaacgtatttgccttctttaccaagaacctgagcagatgtaccagctgaacgtacaagctgtccgcctttaccaggttttaattcaatgttatgcacaactgtaccaacagggatgttgataagcggaagtgcgttacctactttgatgtcagcttcagggccggacatgatttcagtacctacttgaattccttttggagcaagaatgtaacgtttttctccgtctacatagttgattagtgcaatgttagctgaacggtttggatcgtactcaactgtagcaacgcgtccaggtataccatctttatcgcgtttgaagtcgataacacggtattggcgtttgtgtccgccaccttggtgacgtacagtcaatttaccttggttgttacgtccgccttttttgtgaaggggcgcaagcaaggatttttccggctggtcagtcgtgatttcagcaaaatctgaagttgtcatgccacgacgtccgttagaggtcggtttatactttttaatcgccattttgaatttccctccttctttttacagataattaagcttcaaaaatttcgatttctttgctgtctgcagtaagttttacgatcgcttttctgcgacggctagtcataccagtatagcggccgacacgttttgatttccctttgtagttcatgatgttgactttgtcaactttcactccaaagatactttcaactgcatctttcacttctgttttattagctcttacatcaacttcaaaagtatatttcttttcagtcattaaatcagcagaacgttcagtaatgacggggcgcttaagaacatcacgaggatctttcattatgcaagcacctcctctactttttcaaccgcagcttttgtaatcagaagcttctcgtggttgacaacgtctaacacgttgattccgttagcttgaacaactgtaactccagggatgttgcgtgcagaaagagatactgcttcgtttgcatccgcagttacgattaaagcttttttctcaacagataatcctttaaggacagctgccatttcttttgttttaaccgtatcaagagtaagatcttcaagaacaataatgttgttgtcgttcactttagaagacaatactgatttgattgccaagcggcgaacttttttaggtaatttgtaagaatagctgcgtggtgttgggccgaatacgacaccacctccgcgccattgcggtgaacggattgaaccttgacgggcacgacctgtacctttttgacgccatggtttgcgacctccgccgcgtacttcagaacgattttttactttgtgagatccttgacgtaaggaagctctttgcataagaatagcgtcgaatactacgctctcatttggctcaattccaaatacagaagcgtttaattcgatatcaccagcagtagaaccgttttggttgtataatgctacttttggcatgatcaatttcctcctttcctaagagacttatttagatttaacagcacttttaacagtgattaaagcttttctcgcaccaggtacgttacctttaatcaaaagaagattgcgctcagcatctacttttacgacttcaaggttttggacagtgatttgatctccgcccatgcgtccaggtaatagtttacctttgaatacacggttaggatctacaggtcccattgaaccaggacgacggtggtagcgtgaaccgtgagacataggtccgcgagattgtccgtggcgcttgattgcaccttggaaacctttacctttagatactcctgttacatctacgatttctcctgcagagaaaatttcaaccttgacttcctgaccaatttcatacgcatccatatccacgccgcgtaattctttaacgaagcgcttaggagcagtttccgcttttgcaacgtgtcctttttccggtttgtttgaaagcttttcgcgcttatcgtcaaaaccaagctggatcgcttcatagccatcattttcagctgttttcttttgaagaacaacgtttggagctgcttcaataacagttaccgggataagatcaccgttctctgcgaatacttgcgtcataccaatttttcttcctaagattcctttggtcattcgtcacacctcctattaagatcattctatattttagaattaaagtttgatttcgatatcgacaccagatggtaagtctaatcgcatgagagcatcaacagtttgtggtgttgggttcacaatgtcgattaaacgtttatgtgtacgcatttcaaattgctcacgagaatctttgtatttgtgcaccgcacgaaggattgtgtaaactgatttttcagtcggcaacggaatcggaccagatacgctggcaccagaacgttttgccgtttcaacaatcttctctgcagattgatcaaggattctatgatcatatgcttttaaacgaatacgaattttttgttttgccattattttccctccttttcgcctacatcacgttagacagttctccgtgagaaaaacctgatcaccttgccatggcaaagcggccgggtgtgtcagcaacctctcacttcatcgcagtcaaagaccaacatacactattatacagaaaatagacgcatgttgcaaggtttatttaaagaaccttgtggttttcacactttgattattatacaggtgataccatgattaatcaaggatatgactgttttctttcagagatggaacgatgcgaaccggctgacaacttcggcaaagcgatccggttcctccaagtgaggcgaatgggctgagttctcaaaccaatgccattctttatacggcgcatcaaccttctgataatattcataagacgtcgtccccggaaccgtcaaatcgtatctccctgacataaaacagcacggtattacaatagaagaaactgattcccctgcatcaaaggaaatgagatcctcccacaggtgtttcaggctgaacatttgtccccgcgcggctaagaagctccctctcacaccgtacggttcaccaaacagcattcgcccccctgctttaagagcgccgatcggatgatgggtaaagccccctcccctcatttcaatacaaagcagaaacagcgttcgctgcagctgtttctcccatgggggtgctccgataaagctcagcgtcttgcccagcaggatatgtttgtgttgcctgctccattccatcatcaaccggtaggcttccgtttcttccttttgaatattaaccacctgactgataccgatatacgcataatacaaatcaggtttctcttgaagaacttgaagcgccaaaactgaaccccacgaatagccggcgatatatatttttctcctgctgaattgcttgcataagcgttcggtcagatgaatggtgtcagctgtcagctgatccaaagtcatagatgaacccggaatttcctttgaataagagagacccgcccctctctgatcccagttcacaacggtgaaatgcttttccagctcattctggtattttctcgcataaccgatttgaggcgtgccgggaccgccatgcaaaaacaaaagcagcggactactcctgtcatcaccattaatcataatggtttgttcactgccattaatctgcaattgctgaagcattgaaatacgattggttttcttgaagttatcgttcatcggtctgctcctaaaatttgtatacgttctattatacatggaatcagcagggaaacaaaaaaacgaggccccataagggaccccgcattattgaacgagtcgattactcagtgattgtagaaacaacgcctgaaccaactgtacgtccgccttcacgaatagagaaacgagttccttcttcgatagcgattgtagagataagttcaacgatcatttcagtgttatctccaggcataaccatttctacgccttctggaagattgatgataccagttacgtcagttgtacggaagtagaactgaggacggtagttagagaagaatggagtatgacgtccaccctcttctttagaaagaacgtaaacttcagctttgaatttgctgtgtggagtgattgtacctggtttagcaagtacttgtccacgttggatgtcttcacgagctacaccgcgaagaagtgcaccgatgttgtctccagcttcagcgtagtcaagaagcttacggaacatttcaacacctgtaacagttgttttgctgttttcttcttgaagaccgatgatttcaacttcgtcaccgactttaacttgtccgcgttctacacggccagtagcaactgtaccacgaccagtgattgagaatacgtcctcaactggcatcatgaatggtttttcagtgtcgcgttctggagttgggatgtactcatcaactgcagccataagttcaagaattttttcttcgtactcagcatcgccttcaagagctttaagagcagaacctttaacaactggtacatcatcaccagggaagtcgtattcgctaagaagatcgcgaacttccatttcaacaagctcaagaagctcttcgtcgtctaccatgtcgcatttgttaaggaatactacgatgtatggtacaccaacgtttttagaaagaaggatgtgctcacgagtttgtggcattgggccatcagcagcagatactacaaggatagctccgtccatttgcgcagcaccagtgatcatgtttttaacatagtcagcgtgtcctgggcagtcaacgtgtgcatagtgacgagtgtcagtttcgtactcaacgtgtgcagtagagattgtgataccgcgctcacgttcttctggagcaccatcaatttgatcgtacgccatagctgtacctttaccagatttcttatgaagtactgttgagatagcagcagttaatgttgttttaccatggtcaacgtgtccaattgtaccgatattggcatgtgatttggaacggtcgaatttttctttagccattctaaaatcctccttaagagcttttaattagtaatgtatagagtgatagaaagtgaaagcaagctctcacttcctcatcttacaatagtagttatacttgagttaagtggcaaaatcaattattcgcctttattttttttgataatttcttcagcgatgctcttcggcacttcttcgtagtgatccatgaacattgtgaacgtaccgcgtccttgcgtgttagaacgaagggcagtagcgtaaccgaacatttcagcaagaggtaccatcgcacgcacaacttgagcgttaccgcgagcttccataccttctacgcgtccgcgacgagaagtaacatcacccatgatgtctcccatgtattcttcaggaataacaacttcaactttcatgattggttcaagaagaactgggttacatttgctgactgcatttttcaatgccatagaagcagcgactttaaacgccatttcgtttgagtcaacatcatggtaagatccatcaaaaagtttcgccttgatgtcgattagcgggaatccggctaggacaccattttcaagagagtcttcaagacctgcttgtacggctgggatgtattcacgaggaacaacaccaccgacgattgcgttttcgaattcaaagccagcgccttcttcgttcggttcaaattcgatccaaacgtgaccgaactgaccgcgtccgcctgattgacgtacgaatttaccttcaacttttgcaccggtacggaatgtctcacggtacgcaacttgaggagcaccaacgttagcttcaactttgaactcacgcttcatacgatcaacaatgatatcaaggtgaagctcacccataccagagatgattgtttgacccgtttcagggttagtttgtgtacggaatgtaggatcttcttcagcaagtttcgctaaagcgatacccattttatcttggtcagcttttgatttaggctcaatcgctacgtcgataacaggctctgggaattccattgattcaaggattacaagatccttttcatcacacagagtatctccagtagaagtatcttttagacctacagcagctgcgatgtctccagcgtaaacagtagagatctcttcacggctgttagcgtgcatttgaaggatacgtcctacgcgctcacgcttgccttttgtagagttctttacatatgaaccggaatcaagtgtaccggaatatacgcggaagaatgtcagcttaccgacataagggtcagtcataactttaaatgcaagtgcagagaacggctcttcatcagaagaatgacgaacgatctcttcatctgtatcaggacgaacacctttgattgcagcaacatcagttggcgcaggaaggtagtcaagaacagcatcaagtacaagctgaacacctttgtttttgaaagcagaaccaacaagtacagggtagaattcaacattcagtgtacctttacggatagcagctttcagttcagggatagtgatttcttcaccttcaaggtacttttccataagctcttcatcaagctcagctacagcttcaatcaggctgctgcgaagctcttcagcttgctctttgtactcttcagggatttctttcgcatctgaacgagttccaaggtcatcttcgtagaaatacgcaacgttttctactaagtcgatgataccttcgaagttgtcttcagcgccgatcggcaattgaattgcgtgagcgttagcttgaagacggtctcttaaagtgcctacagagtaaaggaagtctgcgccgattttgtccattttgttgacaaatacaacgcgcggtactccgtaagttgttgcttggcgccatactgtttctgtctgaggctcaacacctgattgagcatcaagtacggcaaccgcaccatcaagtacacggagtgaacgttcaacttcaactgtgaagtctacgtgtcccggtgtatcgatgatgtttacacggtaacctttccactgtgcagtcgttgctgcagaagtgattgtgataccgcgctcttgttcctgctccatccagtccatttgcgaagcaccttcgtgagtttcgccaattttgtggatacggcctgtgtagaacaagatccgttctgtagtagtcgttttaccggcatcgatgtgagccatgatcccgatattacgagttttttctaaggagaactctcttgccattgggtaatttctccttccttattagggaattattattttgattatatgaatcctaccagcggtagtgagcaaatgctttgttcgcttctgccatcttgtgagtgtcttcacgtttcttaacggcagcaccagtgttgttagctgcatcaagaatttcgttagccaggcgctcttccattgttttttctccgcgaagacgcgcatagttaaccaaccagcgaagaccaagagttgtacggcgttcaggacgaacttctacaggcacttggtagttagctccacctacacggcgtgcttttacttcaagtacaggcatgatgtttttcaatgcttgttcgaaaacctccattgcatcattgccagtgcgttctttaatgatatcgaatgacttgtataggattgtttgagatttaccttttttaccgtcgatcatcattttgttgatcaggcgggataccagcttagagttgtaaagcggatcaggtaaaacatctctttttgctacaggacctttacgtggcatctgaatatcctcccttcatagttttaatgatttattattattactttgctttaggacgtttcgtaccgtatttagaacggccttgcgcacggttttcaactccggcagtatcaagcgcgccacgaacgatgtggtagcgtacccccggtaagtcttttacacgtccgccgcggatcagtacaacgctgtgctcttgcaggttgtgaccgataccaggaatgtaggcagtaacctcgattccgttagtcaaacgaacacgagcatatttacgaagtgctgagttcggttttttcggtgtcattgtaccgacacgagtacataccccgcgtttttgtggagaagatacgttagtgtgctcttttttaaagctgttgtatcctttgtttagtgcaggtgacttagagttttcaactttgctcacgcgtcccttgcgaattagctgattaattgtaggcatgttgtgttcctcccttcattacgttttataacccacatacccaggtggttcatcattaggcaaaaaaacaatgtctttacataagattgatatcttatataaaaacaaaaagtacgctataacataatggcaacagctgctgctcccacttcaattccgcaggctttgccgagctttttcatggaatccaccatacagacagcggtattttggttctttgcaagctggataacgccagccgtaagaactgaatccgcgtcttttgccacgacgacttccttcactgaacctcgttttagagctttcactgtttgcttcgtaccaataataattgatttggcctgtgatactttatcataagacataaacatatcctccaaagtaacaggttttatttcgagcaccttggttatattatcactctgcgggacggatgtcaacaacgtatgacattttttagtgcagtcccccgccagaataattgtaatactgaggaaaagctgtcgaaacagcctttcctgcagcagtttctgttattcagccggaaccatatcttccgaaggctgaacgtttgaaacaggttttacttttctgtaattcatcatacctgtaccggccggaaccagtttaccgatgatgacattctctttcaggccgagaagttcatcacgcttgcctttaatcgcagcatctgtaagaacgcgtgttgtttcctggaatgatgcggcagacaagaatgaatccgtctcaagtgaagctttcgtgataccgagaaggacaggacggcctgtagcaggtcgattgccttcaagcagcacttttttgttcgcttctgtaaattggtgaatatcaagcaatgtgccagggagaacatcagtatctccggcatcgattacacggactttgcgaagcatctggcgaaccattacttctacgtgtttatcgccgatttcaaccccctgcatacggtaaaccttctgaacctcatgcagaagatattcctgaaccgttgtcaggtcagtaactttaagaagttctttcggatcgattgaaccttccgtcagcacttgaccgcgggtaatctgatcaccctcagtcactttcaggcgtgagttgtaaggtgccgtgtatgaacgggtctcaacagcaccctgaacaacaatctcctgctgtttgtcgcggacttcattgatttcggcaattgtaccgtcaatctcagaaatcgtcgcttgacctttcggattacgcgcttcgaaaagctcctggatacgcggaagaccttgtgtgatatcgtctccggcaaccccgcctgtgtggaacgtacgcatcgttaactgtgttccaggctcaccgatagattgagcggcgataatacctactgcttcgccgacttcaacatcagttccggttgcaaggtttcgtccgtagcatcgtttacatacaccatgaggagtgttacatgtgaacgcagaacggatccacacttcttcgattccggcttcaacgatttccagcgctttatcttcatcgatcaattcattttcgttaatgagcacagcacccgtttcaggatgtttgatctgttttctggcgaaacgtccgatcagacgctcttccagacgctcgatgatttccgtgccttctttgagcggttttgcaagaataccgcggtctgttccgcaatctgtttcacgaatgataacatcctgcgcaacatcaacaagacggcgtgtaaggtaacctgagtcagctgttttcagggcggtatcggcaagacctttacgcgcaccgtgagtggagataaagtactccaatactgtcagaccttcacggaaacttgatttaatcggcaattcaatgattcgtccagccgggttggccatcagaccgcgcatacccgcaagctgtgtaaagttagatgcgttaccacgggctcctgaatcactcatcatgtagatcgggttgacttcgtctaatgatttcatcagtttgccttggataacatctttcgctgaactccaaattgaaatgactctttcataacgttcttcttcggtgattaaaccgcgtctgaactgtttcagaacattatctactttgctttgtgcttcttcaaggatttcctgtttatcatcgagaacgacgatatcagaaacccctactgtgatgccggctttcgttgaatatctgaaaccgaggtttttcatgcggtcaagcattttagacgtttccgtgatatggaatcgtttaaagatttccgcgatgattttacccaaaataccttttttaaacggtgcgttgatcggctgctcagcaatcacagcttttacgtcagcacctttatctaagaagaaacggtcaggtgtcttctcttcaatgttgctcttcgttggttcattcatgtaagggaatgattccggaagaatttcattgaagacgagcttaccgacagttgtaattaacaattttgaacgctgttcttcagtaaatgtcacattcttaagggagttcgctgcaacagctactctcgtatgaagatgaacataaccgttttgataagcaagaagcgcttcgtccgtatttttgaaaaccataccctcgccgactgctccggcgcgctcaagcgtcaggtagtagtttcctaataccatatcctgagacggcgtaacaaccggtttaccatctttagggttcaagatgttttgggccgcaagcatcagaatgcgcgcctcagcttgagcctcagctgataaaggtacgtgaaccgccatttggtcaccgtcaaagtcagcgttataagctgtacatactaacgggtgaagacggatggcgcgtccttcaacaagcgtcggttcgaaagcctggatacctaatctgtgaagagtaggggcacggttcagtaagaccggatgctccttaatgacagattcaagtacatcccatacttcaggctgcacgcgttcgattttgcgttttgcgctcttgatattgtgagcaaggcctttttcaacaagctctttcatgacgaaaggcttgaagagctcaagcgccatttccttcggcaaaccgcactgatacattttcagatgcggacctacgacgataacggaacggcctgagtagtctacacgtttaccgagaaggttctgacggaaacgcccttgtttccctttcagcatgtgagaaagagatttaagcggacggttacccggtccggtaaccggacggccgcggcgtccgttgtcaatcagagcgtcgactgcttcctgaagcatacgtttttcgttctgaacgatgatgcttggcgcgccgaggtctaacagacgttttaaacggttattacggttgatgacacgacggtaaaggtcgttcaggtcagacgttgcgaaacgtccgccgtcaagctgaaccatcggtcttaattcaggcggaataaccggaagcacgtcgagaatcatccaagacggcttgtttcctgaattacggaaggcttcaagcacttcaaggcgtttgatcgcgcgtgtacggcgctgtccttgagaagtcttcagctcttcttttaacatatcaacttctttgacaaggtcgatgtcctgcagaagtttattaatggcttccgcacccatagaggcttggaatttgtttccgtacttatccagatacgcacggtattccttttcagataaaagctgtttcttttcgagcggtgtattggccgggtcagttacgacgtaagaagcaaagtaaataacttcttccagcgcacgcggtgacatatccaatacaagacccatacggctcggaatacctttgaaataccaaatgtgagaaaccggggcagccagttcaatatgccccattctctcacgacggactttagcccgcgttacttcaactccgcaacggtcacaaactacgcctttataacgaacccgcttgtacttgccgcaatgacattcccagtccttagtcggtccgaaaatgcgttcgcagaacaggccgtccttttcaggtttcaacgtacgatagtttatcgtttcaggctttttcacttcaccaaaagaccatgaacggattttatccggtgaagcaagaccgatgttcatatactcaaaattgttcacatctagcaaggggcctacctccctttttatcttcggattaaccgatgtcacttgcctttatcaatcagagactattctttcgttactgcgtcacgttcaacgtctggagatgctgtttcttccggcgcttcatcacctgataatgcaaggccgtcagcctgtttcgcatcttcctcgtcttctagatctctcatttctatttcttcttcatcgcctgagaggatttttacgtccatacctaagctttgaagctctttgatcaatactttgaatgattccggaacaccaggctctggaacattgtcgcctttgacgatggcttcatatgttttcacacgtccgaccacgtcatcggacttcacagtcaggatttcttgaagcgtgtaagctgcgccgtaagcttcaagcgcccaaacctccatctcaccgaaacgctgtccgccgaattgggctttaccgccgagaggctgctgcgtaacaagtgagtaaggacctgtagaacgggcatgaagtttatcgtcaaccatgtgagccagtttgatcatgtacatgattccgactgatacacggttgtcgaacggttctcccgtacggccgtcataaagaactgttttagcgtctcttgacatgcctgcttcttcaagtgtttcccacacatcttcttcacgcgcgccgtcaaatacaggtgacgcgatgtgaatgccgaggtagcgggcagccatacccatgtgaagttctaatacctgaccgatattcatacgtgatggtacacccagcgggttaagcatgatatcgatcggcgtgccgtcaggaaggtaaggcatatcttcttcaggaagaatcttcgagataacccctttatttccgtgacgtccggccattttatcaccttcagaaatcttacgtttctgaacgatatatacgcgtacaagctggttcactcccggaggaagttcgtcgccgtcttcacggttgaagacttttacgtcgtggataattccgccgccgccgtgaggcacacggagagaagtatcacggacttcacgcgctttttctccaaagatcgcatgaagaaggcgttcttcagccgtaagctcagttacacctttaggcgttactttacctacgagaaggtctccgtcgttgacttccgcgccgatacggataattccgcggtcatcaaggttgcgaagcgcgtcttcccctacgtttggaatatcgcgggtgatctcttccggcccaagctttgtatcacgtgcttctgattcatattcttcaatgtgaatagatgtgtatacatcatctttcacaaggcgttcactcatgatgatggcatcctcatagttgtaaccgtcccatgtcatgaagccgaccattacgttgcggccgagagcaagttcaccaagctccattgaaggtccgtcagcaaggatttctcctttgactacttcatcgccgacacttacaatcggacgctggttgtagcacgtaccttggttggagcggacaaatttcagcaagctgtacttatccaggttgccttttactttttggccgtcaatttcttcatagcggcgcacccatacgtttttcgcttccacccgttctacgataccagggtgtttacaaataacggctgcaccggagtctttaccggatacgtattccatacccgttccgacgatcggagcttccggctgcatcaaaggcacagcctgacgctgcatgttcgctcccatgagggcgcggttcgagtcatcgttttccaagaacggaatacatgctgtcgcagcagaaacaacctgtttaggagatacgtccatgtaatccacgcggttgcgggctacaacggtgttttcccctctgaaacgcgctacgatgctgtcatccaagaaagaaccgtcatcgctcagcttagcattcgcttgggctacgacatagttatcctcttcatcagcagtcaggtagtcgattctaggcgttacttttcctgtttcaggatcaacgcggcggtatggcgtctcaatgaaaccaaagcggtttactttcgcaaatgatgacaatgagttgatcaaaccgatgttcgggccctcaggcgtttcaatcggacacatacggccgtagtgagagtagtgaacgtcacgtacttccatacctgcgcgctcacgcgtcaaaccgcccggtccgagagctgacagacggcgtttgtgcgtcaattcagcaagcgggttcgtctgatccatgaattgagaaagctgtgagcttccgaagaactctttaatagacgcaataacaggtctgatgttaatcagctgctgcggcgtaattgtattcgtgtcttgaatagacattctttcacgtacgacacgttccatccggcttaaaccgatacggaattggttttgcaggagctcacctacagaacgcagacggcggtttccgagatggtcgatatcatcagtgtcgcccactccgtgcaggaggttgaagaagtagctgatagaagaaataatatcagcaggcgtaatgtttttaatcgcctcttcgatgtaagcattgccgatcacattgatcgtctgctctccttctgcatcagtaggagcatagattttaatggattgaagcatcacttcatcctcgacaacgccgccgttaggataaagttttctgaagccgattccattttctaagtatggcaatactttatcaagtgttcttctgtcaagaatctgccctttttcagcgagaatttcaccggtttccggatccaccagtgtttctgcaaggcgctggttaaacaggcggttcttgatatgaagctttttattaattttatagcgtcctacattcgcaaggtcgtatcgcttcggatcgaagaaacgggaatccagcaagctttttgcgttttctactgtaggcggctctccgggacgaaggcgctcatagatttcaagaagcgctttgtcactgttttcggtgttgtccttatccagtgtattgcggagatattcgttctcaccaatgagatcgagaatctcttggtcggaaccgaagccgagagcacgcaaaagaaccgtaaccggcaacttacgtgtgcgatcaatgcggacatacacaacatctttcgcatcagtttcgtattctaaccatgcgccacggtttggaatgacagtcgcggtaaaaccttttttaccgtttttgtctactttaccactgaaatatacacttggagaccgaacaagctgagatacgataacacgttctgcaccgttgatgataaaagtaccggtatctgtcataatagggaaatcacccatgaagacatcctggtcttttacctctccagtttctttgttaattaaacgaaccttcactcttagcggagctgagtaagtcacatcacgttcttttgactcttcaacgggatacttaggatctcctaaactgtagtcaatgaactctagagagaggttaccagtgaaatcctcaattggtgatatgtcttgaaacatctctctaagaccctcatcaagaaaccactgataagaagaggtttgaatttcaatgagatttggtaattctaacacttcgctaatgcgagcatagcttctgcgctggcggtgtcgtccatactgaactagttgacctgtcaactgattcacccctcaaatcatgcgtattatatgtgtaataagcatctcttacgataaagaaatacttttacaagacaaaagaaaaaagggtttctaattaagaaaaccacatccaaaaacaaataccgattttattagcatttccatgtttgtataatttatacatgcactatgattatttgagcatatcatgcaaaatatatacattggcattttacaatattaacatagctgaaaattcaagtcaaactttttttgcttttatgatataatagcctttctttttttgaaccacagaaacttcgtcaaaaagctccttcagtttttcaatggcagaaggcccgccctgttttttctgtataacgatccacaattcacctgaagcccttaaatgctcagcgcttttttcaaaaatggcatggacaactttttttccggcgcggattggggggtttgtaataatagaagcaaatgtttgagcagaatcaatatttgaaaataaatcactctgataaatccgaacgttttttattccgtttttttctgcattttcatttgacagctctacggctctttcattcacgtcaatcatgtgcacggtccggtctgtaaatgcaccggcgagcgacagaccgatcgggccgtaaccgcagcctgcatccaggaagtcaccatcgatctccggctcttcaaacgcttcaattaagacacgcgaaccgaaatcaacttcctttttcgagaaaacgccgctgtcacttgtgaatgtataagatctgttccgcagtgtaaatgaccatgtctgtttatcgcttttaactgaaggtttttctgaataatagtgttcactcattattagaacctccttttttaattgcacttaaagaaaagcaaagaaaaagcccgcctcataaaagcgagcttcccctacaggcaagtgaagattacttaacttctacagaagcgccaacttcttcaagtttagctttaagctcttcagcttcttctttcgcaataccttctttaagtggttttggagtgttgtcaacaagttctttagcttctttcaagccaagaccagtgatttcacgaacaactttgataactttgattttctgagaacctgcaccagcaaggataaggtcgaattcgctttgctcttcagcagcgccgccagcagcagctccgccagctacagctacaggagcagcagcagttacgccaaattcttcttcgattgcttttactaggtcgttcaattcaagtacagttgcttctttaacggaagcaatgatttcttcgatatttaaagccatttgaaattcctccatttgttttattttagggtaaaatcagattaagcgccttgttcttccttttggtctgcaactgctttagctgcaagtgcaaggttgcgaactggagcttgaagtacgctaagcaacatagaaagtaagccatcgcgtgaaggaagttcagcaagagctttcacttcttcaacagaagatacttttccttcgataacgcccgctttgatttccagagcttcgtgatttttcgcgaactcgttaagaacttttgccggagcgacaacatcttcagtactgaatgcgatcgcattcggtccagttaagacatcattcaaaccatcaagttcagcttgttcaaccgcacggcgagtcattgtgtttttgtacactttgaactctacgttagcttcgcgaagctgtttacggagttcagttacttcagaaacgttaagtccgcggtagtcaacgatgatcgttgatttgctttctttcagtttagaagcaatctcttcaacaacaactttttttgtatcaattgcgctgctcatggttacacctcctgtagattttgtgtaacacttataccgctaggtgatcacgactgtgacgacgatttcatataaaaagcctccatgtggacatggaggctgtatatacaagcatacgtaacgtaatagctgtgatatatatacacctcggcaggatattaagcctcaacggcccctgctgtctacggtataaatgacatattatattttacaacattttgaatcatatcagaatgctgatctaaagtcaaatattattttacgttgaaagtagaagcgtctactttgacaccagggcccatagtagaagtaacggcaacgtttttcacgtaaacacctttagccgcagccggttttgctttcaggattgtatcatacattgttgtgaagttctcaacaagtttttcatcctcgaaagaaacttttccgatcggaacatggatgttaccagctttgtcaacgcggtattctactttaccagctttgatttcgccgattgctttttctacttcgaatgtaacagttcctgttttagggtttggcataagaccttttggtccaagcacacggccgattttaccgacttcacccatcatgtcaggagtcgcaacgattacatcgaattcgaaccagccttgctggattttcgcgatgtaatcagaatcaccgacgtagtctgcaccggcagcttcagcttcttttgctttttcgcctttagcgaatacaagcacgcgctgagttttaccagttccgttaggaagtacaactgcaccgcggatttgctgatcgtttttacgagggtcaacccctaaacgaaaagcaacttcaactgtagcgtcgaatttagctgtgtttgtttttttagtaagcgccactgcttcagcgacgtcgtaagctttcgcacggtctacaagcttcgcagcttcaacgtactttttaccttttttagccattttaaaatttcctccttatgtggttatagcggaataacctcccacgaataagggttgcgaacttgtgaaaactcgcaacccgacaagaaacaaattaatcctcgataacgatacccatactgcgggcagtaccttcaaccatgcgcattgccgcttcaacgtctgctgcgtttaagtcaggcattttcgtttcagcgatttcgcgaaccttatcgcgcttaacggttgccactttattacggtttggttcaccagaaccagactcaattccagctgcttttttaagcaatactgcagcaggcggagtttttgtaataaatgtaaatgaacggtcttcgtaaaccgaaatttcaacaggaatgattaaaccagcttggtcagctgtacgagcgttaaactccttacagaatcccatgatatttacaccggcttgacctagtgcaggtccaactggcggcgctgggttagcttttccagcaggaatttgcaattttacaacttttactacttttttagccacgagacacacctccttaagtccgtgatgtggtaatagggtaaaccctcccactcaaggtttcattctttatatgaatgacgaaatatcaagctagctgccttggattagtccaagacgtacctttgctatattatcattaatatatagcaatttcaagttttttcacattacaatttgtcgatctgggtaaattccagctcaaccggcgtttcacggccgaacatgttaacgaatactttcactttgctcttatcataatcaatctcttcaattgatcctgtaaagttggcgaaaggtccgtctatgactttgactgtctcattcaattcaaaatcaatgtcggttttccgctcatccatgcccatccgctttaagatggtttccgcttcgccaggaagaagcggagtcggctttgagcctgaaccggctgatccgacgaatccggtaacgcccggcgtgttgcggaccacataccaggaatcatcagtcatgacgatttcaacaagcacataacccgggaacactttctttttgactacttttttcttgccgttcttaatatcagtctcttcctcttcagggacgacaacgcggaaaattttatcctgcattcccattgattccacacgtttttcaaggttcgcttttactttgttttcataaccggaatacgtatgaacaacataccaattcttttccattctatcaggactctgcagtccttccctccccgcatttaaaaatgaagtgtaaaacaaaaaataggctcagagcctatgaatccttttttcaacacaataaaaaacccgctgaacgggttttggcaaacgatattatgatctattatagcacgtattgctgatcattattcaactattaaacgaattaattgagaaattcctgtatcaaggagggcaaaaaagataacaaaaaagataaccgttgaaatcaccgtgatcgtatagcgcgttaactctttgcctttaggccagctaacctttttcatttctttcccaacatctttaaagaaactcatcatgcgcatgtaaaagacctccacaatttaaaaagcgaacactattttgtttctaaatgagctgtatgtgaattgcaagtgctgcagtacttcttaacttctaaccgctcagccgctgatgcagagcttttcattgtcgtataattacgatttccgcatgttttgcatgccagcgtaatcttttttctcatgtcgttacaccttttcctaaacaatcatttatcttaataaaatagcacagtcagaaaaattctgtcaatatgacacagaaacccgctacagactgatttctcttatttccaaatacttttcaagcttgcgcttcacgcgctgcagggcattatcgattgattttacgtgtcggtttaaatcatctgaaatttcctggtaacttcttccgtccaagtacagaacaagcacctttctctccagatcgctcagcagttctcccattttcatttcgatatcatcaaattcttcctgattaataatcatctcttcaggatttaacgttttagcgcctgaaatgacatcaagcagtgttctgtcagattcttcatcaaaaataggtttgtctaaagaaacataggaatttaaaggaatgtgtttctgacgggtagctgtctttattgcggtaataatctggcgggtaatgcataattctgcaaaagctttaaatgaagtaagcttgtcctctctaaagtctcggatagacttatataagcctatcatcccttcctgtacaatatcttctctgtcggcccctattaaaaaataagaccttgctttcgcccgtacaaaattacggtacttcgtaatcaagtaatctaacgcatcactatccccaacatgaaccttttcaatgacctgctcgtcctccaactggcaaaattgcactttgttgaactttcccttgctgttctgtagattcactgcgatccccccggcgcacgtagatagaaatattatacattaatgggcgaaaaagcgtcaacctaatccagaccgcctcggcgccacttttcaaacgttttcaaaacctcttcggacagctcgattttacccggtggtttttcagaagtgatctttgaaacccgcctttgaatccgccgttctatcgtatccacttccctcagaagctcccgggcggatttgcggagagccccttgtccgaaaatcgcccactgctccgtataatcggaggttgcgacatgaatctgtgtcgcaatattattcagcgcctgggcaagtttctcgatccgctcatccgccgtctcattctcccgtgtaaaaatcacttcgactctgtgattcgtttgttttttctctatgccttttaccagatgtgcgtcaaacaccacaatgactctgattcccgtgtaggactgatattccgccatcttctggatcagtacatctctcgcttcttcaaaactgttcgcttttaaatcctttagctgcggccaagctccaatcatgttgtatccgtctactaacaggatgtccatctgtcattattcccctaaaggattgcgcttccggtagacttcatacatgagaaggccggccgctaccgacgcattcagagacgtgacttttccggccatcggaagtttaatgagaaaatcacatttctctttcacaagccggcccattcctctgccttcgcttccgataacgagcgccaaaggcatcttgccgtccatagagcggtagtcttcccgggcggatgcatccgttccgacgacccaaatcccccgctccttcatttcatcaagtgtccgggcaaggttggtcaccttcacgacgggaatgtgttcaatcgcaccggtcgaagcttttgcgaccgtcgatgtcagtccgaccgctctgcgtttcggaatcacaatgccgtgtgcaccgacagcgtcagccgttctcatgatggaaccgagattatgagggtcttccagctcgtccaatatgagaaagaaaggctgttcgtttctctcttccgctcttttatataattcgtctaattgtgcatattcatatgccgccacctgggcgacaacaccctgatgctgcccctccaccatctgatcgagttttttcctcggtacaaattgaatggtgacgccgcgctttttagcaagctccataacttgctgcgcctgtccttttactgtgttttccgccatccataacttatacagcttgcgatctgactttaacgtctcaatcacagcgttttttcctatgacgtaatcatgttgctgactcatttgttttcctccctgacgtcccgacttgtatagcctcagcaatcagctgattcagtctttcttctcttttctcaagaaaaaggtatccgagtaaagcctcaaaagctgtactatggcggtacgtctgtacatctgtgtttttaggcgtggtccctgatttcgcgtttctgcctcttctcagcacggcttcctcttcctccgtgaaaaaggattcgtcctgaaggcggaacaatatgtctgcctgtgattttgccgatacaatccggctcgccttcttatgaaggtcattcggtttcgtaaagccctgcttaagcaggtgatgccggacgtatatttcaaaaatggcatcacccatataagcaagcgcaagaccgtttaactgctttgaatctttgatttgttcaaattgaagcatccgcttattctccccgcttccagcgagttccctgggctgtgtcttcaagaatgatattcatgcttttcagctgatcgcgaatctggtctgacaaagcgaaatcgcgattgcggcgggcttcatttctcttctcaatcaactcttcaatctcttcgtcgacaagctcttcttcgccgagcgtaagtccgagaacagatccgattctgtcaaacatgctgataaaggctttaatgacgtgatccgccgtattgtcttcctgcatgtagtaattggcgagcttcgccagatcaaaccaaacggaaatcgcattcgccgtattaaaatcatcatccattgcttcttcaaacgaagcgcggtgctcttcgattttagcgagccattcctcatcattgtcagtcagattcgtgctgctaatcaaacgatggtttaaattactgtatgccgtcttgaggcggttaaacgcgttttttgttttctcaagcagctcttccgaatagttgatcgggtggcggtaatgaacggaaagcatgaaaaatctcaaaagctgcgggtcatattgcttaatgatatcgtgcaccaaaacaaagttgccgagcgattttgacattttctcattatcgatattgatatatccgttgtgaagccagtattttgcgaatgtcttgcctgttaatgcttcagattgcgcgatttcgttttcatggtgcgggaatgtcaggtcctgaccgccggcgtgaatatcgatttcgtcacccaaatactttttcaccattgcggagcattcaatatgccagcccgggcggccttttccccaagggctatcccatgaaatttctccgtccttagcagctttccaaagcgcaaagtccagcgcatcctctttcttctcgccgacacggatacgcgcgcctgatctgagttcatcaattgattgctgagatagcttgccgtagccttcgaaggcccttgttttgaaatagacgtcgccttctgattcataagcgtagccttttttaatcagctcgctgacaaattcaataatggcgtccatgttttccatgacccgggggtgaagatccgctttccggcatccgagggcgcccacgtcttcaaaatacgctttaatgaaccgttcagaaacggtcgggacgtcctcgccgagctcgttggccgctttaatcagtttgtcgtcaacatcggtgaaattcgatacgtattgaacatcgtatcctttatactccaaatagttgcgtacggtatcatacacaatcgccggacgagcgtttccgatatgaatatagttgtatacagtaggtccgcacacgtacatttttactttgccttcctcaagaggaacaaatgtttcctttttccgtgtcaatgtattataaagtgtaatggtcatttttggttgatcctttcttttttatcttccagttcagcctgcagttcaaaaatctgctgctccaatgctctaaaccggtcagcaaccggatcgggcaagtcttggtgattgagatcgcgtttgatttttcttccgttctgaatgacgactttccccggtatgccgacaacggtcgaaaagtcgggaacatcacgaagcacaacggagccggcccctactttagaaccctgcccgaccgtaatagagccgagcaccttcgctccggttgcaattaaagcatcatcttttatggtcggatgccgcttccccttttcttttcccgttcccccgagagtgacaccttggaataccgtcacgttattgccgatttcacatgtttcccctatgacgacccccataccgtggtcaatgaaaaaccttctcccgatggtcgcgccgggatggatttcaattccggtaaagaaacgggcaatctgtgatatcaggcgcgccaggaagaaaaatctccgtttatataaagcatgtgcaatccgatgcgcccatatagcatgtaaaccagaataagttaaaacaacttcgaaatagcttcttgctgccggatcttgatcgaacactgtatctatgtcttcttttagcattttaaaaaacacatgcttccccccattctctccccgctccagtctgtttttccgcctataaaaaaagcgcctctgcatgtaaacatgacagagacgcttttaccgcgcggttccactctgtttgaaaaacaagtcaatgttttcccaacttaaaagccggtaacggcggcggccgcctttaaatactgatttccgcagaaatgttcttcaaaggtcttaagggcgcacttctaaaacatgacgcatgaatctctctcagccgatgaagattctttctgtaatggtcattgttttatactcttccctgtcaacaatcgtatatttaaatgcttttcaggcgtctgacggctgtttctctgccgatcagctcaatggcctgcggaagctccggaccgtgtgtctgaccggtaaccgctacacgaatcggcatgaacagctttttgcctttatggcctgtttctttctgaacagctttgattgaggctttgatcagctcaggcgtaaattcttcaagctcttcaagcttcgcagcaaatacgctgagcacttcaggcacctgttcttcttccagaacggcttttgcctcttgattatactcgatctcatctttaaagaacaaatcagtaagctcgacaatttcagcgccgtagctcaattgctcatggtaaagagagattaatttacgaacccattcctgttcttcggcagaaagctcagtgccgacttttcctgctttttgcaggtgcggcagggtcagctcaaccacttgatcaagatccagcgctttgacgtattggttgttgacccatttcagtttatgcatatcaaacagagccggtgacttagacaaacgatttacatcaaaaatttcaatgaattgttctcttgtgaaaagctcttcttcaccgacgggagaccagccgagaagtccgataaagttaaacagcgcttcaggcaggtaacccagctcatcatactgctcaataaactggataattgattcatcacgtttacttaattttttgcggctttcgtttacgataagcgtcatatgtccgaagacaggaatatcccagccgaatgcctggaaaatcatgatctgtttcggtgtatttgaaatgtgatcctcaccgcggagcacgtgcgtcattttcattaagtaatcgtcaatcgcgacggcaaagttatacgtcggtgttccgtcttttttgacgatgacaaagtcgccgatgccgtctgattcaaaagaaatctcgccttttacgatatcgttaaatgcgatgattttcccttccggcacgcggaaacggatgctcggctgtctgccttcggctaaaaactgctcctgctcttcctgagtcaggtttctgtgtttgccggaatagcgcggcatttccccgcgggcgatttgctcttcacgttctttttcaagttcttcttccgtacagaaacatttataagcaagccctttttcaagaagctcttcatagtactctttgtaaatgtcgttacgctcagactggcggtacgggccgtattctccgccgacatccacactttcatcccagtccatgccgagccatttcaaatagttaagctgactttgctctccgccttcaatatttcgctttttgtccgtatcctcaatccggataataaactttccgccttggctgcgggcaaataaatagttaaaaagcgccgttctggcgttaccgatatgcaaatgtccggtcggactcggtgcataacgaacgcgtacttcatttcccatgttcaaatacttcctttcatctcgtctgtagcctctagccgaatatatgtatctattctaccaccaaatagacccggcatcaaaacaatgatcaggctttttgaatcagaacggttgcctgagcggcaattccttcggctcttccggtaaacccgagcttttcagtcgtcgtcgcttttacgtttacttgagagacgtccgcctcaaggccttccgctatccgttttctcatagcatcaatatgcggcgccattttcggcttttgcgcaataatcgtgcagtctatatttccgagtacgtaccctttttcttttacaatgttccagacatgctgaagcagcttaaaagaatcagcatccttgaattccggatcagtatccgggaaatgcttgccgatatctccttcacctgccgctccgagacacgcgtctgcgactgtatgcagcaatacatcagcatctgaatgtccgagcagtcccttttcataaggaatttcaattccgccgatgatgagcggacggccttccgttaattgatgcacatcaaatccttgtccgattctaaacattatgattcccactttccgctttcatgattgcttccgcaaatatcaggtcatccggcgttgtcagcttaatattggtatagctgccttcaacgatactcacctgatatccatcaagacgctcgacgaggctggcgtcatccgtacctaagaagcctttgttttccgcttccatatgcgccgtcttcaataaagaaagacgaaaagcttgcggcgtttgaacggcccacaagcttgaacgatcaaaggtctccgcagcccgggagccttccgcccgttttatcgtgtctttcacaggaacagccaggacagccgctcccgcctcctctgctgtttcaacgagcttatcgatatgctgatgtgtgacaaacgggcgcgctccgtcatgaacaagcacgaccgattccttatcaatcactttcagtccttcgtatacactgtgctgacgctccgcacctccggtaacaagctcaatttccgtctgaatcggaaattggaccagcagctggcgaaaatcttcccgttcactctcgtttatcaccaggattattttctgacagggtgcgtggctttcaaaaacccgcagtgtgtgtataataacgggcgcaccttttaagctgatgaacagcttatttttcccggccttcatccgttttccttgtccggcagccggaataacgacaacatactccatatgaactccctcttaaagagctttctcaagcagcttgggcttggcaaaaatcattcgtcccgccgctgtctgcagtacgctggttacgagcacatcaatatgtttccctatataattgcggccttcttccacaacaatcattgtgccgtcatctaagtaagccacaccttgattatgctctttcccgtccttaatcacctgcacattcatctcttcgcccggaagcacaaccggcttcaccgcgtttgcaaggtcattaatattcagtaccgcaaccttttgaagctcgcatactttatttaaattaaaatcattcgtcacaacgacaccggatgtcagcttcgcaagtttgacaagcttgctgtcaacctcctgaatgtcttcgaagtcgccttcataaatttcaaccgtaatatccagttccttttgaatgcgattcaagatatccagtccgcggcgtcctctgttacgttttaaaacatctgaagaatcagcgatatgctgtaattcctccagcacaaattgaggaatgacaatgacgccttctaaaaagcccgtctgacaaatatctgcaattctcccatcaataataacacttgtatccaagattttcagccttttatcctgttcttcctgctcctcatcagcacttccctttttcttctgcattcttgcagaaatggagaaaagactgatcagttcatcctttttcttaaatccgacttggaagcccagataaccgagaaagaaagccagaaagaccggaatgatggtgctgaatatacggtacggaatattgtccagcggaatcacgtttacaatgagatatgcgatgataagtccaaaaaccaatccgagactcccgaataacagatccggcaccggagctctcagcaaagaatcttcaatccattttacccaattaatcacatattctgtcgtccatatactgatgagaaaaaagataatagcaccaattgcagcagacgtatatgcgtttgttattaaaggtatgtcctgtatatttgacagcacaaacaattcaggtattaaaaagataccgacaacgccgcccacaataatgaagaacgcctgaactattcgttttaacatacctccacctccttttaagtagcattttttcagcagactgtcagagcctacaaattcagaataaacaaaaactaacaataatatacccggattccgacaggtttaagcgatacttaaagctgtctatctatatagtgtttttcctgaaggcgttttaagccttttttgattttttgggcgcgcacttcgccgataccctcgacatcatcaagctcttctacagtggcttccgttatgctgggcaaaaatccgaacgcctcaaccacattttcaacaatcggcatcggcagacgcggaattttgttcagcagcctgtagcctctcgggagcacataatcatcaagattcgtagaagccgggtatccaagcagtttaaacagaatggaatcatccagcagatcatagctggacatatcctggagctcttttaacagcacgaacggatctttgattttttctttgacatagtctttgatgaaaagtgccgcctcttcttccatgtccgtaatcagttcaatcacctgcagacggattaagtgtccttccgttccgagttctttaatatacatattgatttcattttttattcggagcaccatttcataccgatgcatgacagacagcacgtcactgaatgtcacaagctcctcaaactctaatgcgtttagagccgtaattgttttgtctaaaatggttttatacttctcgagcgtttgaatggcctgatttgcctttgttaaaataaaacctatgtcctttagtgtgtacttcatgctgtcctgatataacgtaatgacatttctgcgctcagaaatggcgatgacgagacagccggtctgcttcgccacccgttccgccgtacggtgcctcattcccgtttctgaagaagaaatggtcgcctccggcataagctgtgtattcgcataaagaattttctggccggaatcacttaaaataatggcaccgtccattttggccagctcgtataagtgagcgggcgcaaatgatgtattaatatgaaaaccgccatcgacgacttgctttaccttatcattgtatccgacaacaatcaggccgcctgtatttgcccgaagtacattctctatcccggctctgagcggggtgcccggtgcaacgaactgcagaattgcagacaggtcaagctcttgtttcgccccttttttctctttttccatctattatgatcctcctaatgaagtacgaagcgcttctgcaacatttgctactccgacaacctcaatcccttttggtattgtccacccatctgcattcgcctcaggtatgatcatgcgcttgaagccgagtttcgccgcttcttttacgcgctgttcgattcttgacaccctgcggacttctcctgtcagtcccacttcaccgataaagcaatctgcgggattcggcggtgtatctctgaagcttgaggcaatgctgacggctactgccaaatcaatcgccggttcatccagtttgaccccgccggcgacttttaaatatgcatcttgattttgaagcaaaagacccacccgcttctcaagcacagccataattaacgataccctgttgtggtcaatgcctgtagccatgcggcgcgggtttccaaaactggtcggtgatatgagcgcctggatttcaaccagaatcggtctcgttccttccattgacgcaacgatactcgaacccgatgccccggcagaacgctcttccaagaaaatttcagaagggttgagcacttccgtaagcccctcttcccgcatttcaaagatgcccatttcatttgttgagccgaaacggttttttacggcccgcaaaatacggaatgtatgatgccgctctccttcaaagtatagaacggtatcgaccatgtgctcaagcaatctcggccctgcgatcgatccttcttttgtgacgtgtccgacgataaaaataggtatgccgtttgttttcgcgattttcatcaattcggccgtacactctcttacttgtgatacactgccgggagctgaggtgatatcactttggtaaacggtctgaatggagtctacgacaacaaatgcgggtttcatctcttgtatagcagacgaaatatactccatatcggtttcagataaaacatgtaacatttggctgttgatgccaagtctgtcggcgcgcagcttcgtttgcttcacggattcttcccctgaaatgtaaagcacgctgccggccgtatctgctaattgtgcggatacttggagaaggagcgttgattttccgatcccgggatcgccgccgatcaatactaacgagcctttcacaacgccgccgccaagcactctgttgaattcttcgagctttgtttgaacgcggggttcttctgatgtttcaattgatgtaatgggtgatggtttctggacggtttgaacggagtgggagaaagccgcccgccgattcgccggcgctttttttatggtttcttccaccattgtattccaagccccgcagcccgggcactttcccatccattttgcggattcataaccgcatgagtggcagatgaattttgtttttgatttagccatatatgttgtaagacctcttccttatcgaatatttctctatataacaaagtgaggcatacactcgcttacgtatgcctcatgtttgtcactatattagttcgttttagcagttgtttttacgacaaattcgccgtcctcaacatcaagaacaatgtgttggcctttatcaatattgcctctgaggagttcttctgataaccggtcctccacatgcttttgaatcgctcttcttaacggacgtgcgccgtattccaaatcgacgccctcttctgctacttttgctttggcagcatccgtcagctcgatagagagatcttgttctttcagacgttttgttaactgatcagacataagcgacacgatgtctgtaagatgttttttctcaagggagtggaagacgataatttcgtcaatccggttgataaactcaggtctgaaggcacgcttcaactctcccatgactttgtctttcatgtctttatggttttgtgattcatcctggacattgaagcctacatatttgttgcgcttcagctcgctcgccccgacgtttgacgtcataatcaggatcgtgttgcggaaatccacagtgcgtccttttgaatcagtcaagcgtccgtcttcaagcacttgcaggagaatgttaaacacatcagggtgtgctttttcaatttcatcaagcaatacgacagagtaaggttttcttctcactttttctgtcagctggccgccttcatcatagccgacatatcccggaggagaaccgacaagacgtgaagtcgagtgtttctccatgtattcggacatatccactctgatcatcgcttcctcatcaccgaaaatggattccgccagcgctcttgccagctctgtcttcccaacgcctgtagggcctaagaagatgaatgaaccaatcggacgtttcgggtccttcagtccggctcttgcacgtctgacagcctttgccacggctacaacggcttcatcctggccgatgacgcgggaatgcagaatgctttccatattgagaagcttatctgtttccgtttgggcaattttagatacgggcaccccggtccagctggatacaaccatcgcgatatcctctacagaaacttcggagttctcctggccttgtttttctttccaggtttttttcgtgtcttccacctgttctctcaggcgctgctccgtatcacgaagggaagccgctttttcaaactcctggctctgaacggcagcgtctttttccttgcgaacttcatcgagtttctgctcaagctcttttaagttcggaggcgttgtgaaagaacggagacgcacttttgaaccggcttcatcaattaaatcgatcgctttatccggaaggaagcggtcagaaatataacggtcggacaatttaaccgcggcttcgatcgcttcatcggtaatggatacgcggtgatgcgcttcatagcggtcacggagcccttttaaaatttgaatgctttcatcggctgacggctgatccacctgaatcggctggaaacggcgctcgagagccgcgtctttttcgatatatttacggtattcatcaagcgttgtggcaccgatgcattgaagctctccgcgggccagtgaaggttttaaaatattcgatgcgtcaatcgcaccttctgctcccccgctccgatcagtgtatgcagttcgtcaatgaataaaataatattgccggcctgacgtatttcatccattacttttttcaagcggtcttcaaattctccgcggtatttcgtaccggctacaaccgtacccatgtctaacgtcattacgcgtttatcacgtaaaatttccggcacttcattattgatgatctgctgtgcgaggccttcagcaatcgcagttttacctacacccggttctccgataagaacgggattatttttcgttctgcggcttaatacctcaataacacgctgaatttctttgcttcgcccgataaccggatcaagactgtcttccttcgcaatcgcagttaaatcacgcgccagactgtcaagcgtcggcgtgtttgcattgctgttggtaccggatgcagaagaccccgtctcattgcttcccagaagctgcagcacttgctgtctcgctttatttaagctgacaccgagattattcagaactctcgccgccacgccttctccttcacggatcaatccgagaagtatgtgttctgttcccacataagaatgtcctagctttctggcttcatccatgctgagctcaatgactttttttgctcttggcgtataatgaatcgtttgagacatttcctgtccccgtccgattaagctctccacttctttctgaattttatccgaaccgagtccgagtgcttggagtgctttagccgcaatcccttctccttcacgaaccagacctaataagatatgttcagttccaatattgttatggcctaagcgcagtgcttcctcctgtgccagtgccaataccttttgagctcgctctgtaaaccttccaaacatcatatcgaatcatcctcctgtctatttgcactcatttctaaatgcagcctttccctgataagcgccgctcttctcgcgtctctttcgttcggccgtaatgcaccgcccgaatattgctggagaaaacccggctgtgtcaaaatcatcagttcattaagtatattgcttgatagccctttgatgatcccaaggtctatccccagccgaacgtcagaaaggcatttcgccgtttcctttgattcaatcatacggcagttggataaaacgccgtaagatctgaatacccggtcctccaattcaattttcgaagtttggtaaagcgcttctcgggctgaacgttcctgctcaatcagctgggcagccacactgtttaaatcatctacaatgtcctgttctgattttccgagtgtgatttgatttgaaatttgaaagatatttcctaatgcttcgctgccttcaccgtaaattcctctaacaactaagcctaattggttaattgccggtataattcgattcatttgcctagttaatacaagacccggcaaatgcatcatgactgaagcccttagtcccgtccctacatttgtaggacagcttgttaagtaccctctcttctctccaaaggcgtaatccactttctcctcaatccagtcatcaacctggtttgccgcttttatggcgttgagaagctggaagccggggaagaggcattgaattctgatatgatcttcttcatttaacataatgctgacttcttcattttcagaaagcagacagccgccaaaaggagattccgttaaattcgggctgatcagatgtttctccatcagcacccgtttttccaaaggctgagcttcactcattctgattaaatgaaattgaccgatatcaggcagttccttacctgaaaaatgatcttcgaattgctgaatgatggatgaggcttcttcattcgtataccgggcgggaaactttatattttcaaagtttcgggccaaccgtatacggctgctgagtacaatgtcactttcaggtcccttttgcttcatccaattgcttagtgcgtcctgaataaaatgcttgagcgacattacccttgttcccctcactgtctgtactttttaattcctgctctaacgatcggatctgatccctgacctccgctgctctttcaaactcttcgtggtgtattaaagattcaagttctttttttaacatttccatttgccgtcttacatgcaggtttccgcctattcgttttggaattttcccggcatgcaccgtattcccgctgtgaacttttcgcaagatcggcgtaatttggctgtagaacgtatcgtaacattccgcacagccgaaacgccctgtttttctcagctgctgaaacgtcataccgcatttcttacaagctgtgccttgctctgagtagccgaacatttgagaaccggtgttttgaaatgaggactccatattcagcagtcctgataataaattatgaattgagaacccttggtttccacttatactgtatgaatcgctattttcttttgcacattgttcacaaatatgaacttcttgcttttctccattaacaactttcgtaaagtgaaaagtggccggtctctcattgcattcttgacaaatcaatcttttcacccgcttactttagttttaaagatgtgagcattgctttcatcattctggctcttagttcatcccgttcgggcaaatcaatatatagaactgaacgatccattacactcaccatcattttagcttctctttccgaaataactccgtcctctaacagtctgagaataatgtcatcagaggctgcctgggacaagtgggtatggatctgcgaaataatattattgatgaggacgacttcgttattcattttaattttgataatacgaatataaccgccgcctccccgtttactttcaacaatatatcctctttcacttgtaaatctggtgttgatgacataatttatttgggaaggaacacattgaaatttatcagcgatttcactgcgtttgatctctaaaatttctttgccattttgatctaatacttgtttcaagtactgttcaatgatgtcagaaatattatgtcccactcaaccccctcctttattgactttgactatatttgactttaatcttactataaggtgtttcgcaaaatttttcaactgtatcgctctatctctattatttccactttacacaagcataaaacctgcttttgcaaaaagccatatcgttacttttctcatactatataacgtatgcagaaaaacacaaaaaaggcagctcatgatgagctgcctttaccgtaaatatagcttggcggcgtcctactctcacagggggaaacccccgactaccatcggcgctgaagagcttaacttccgtgttcggcatgggaacgggtgtgacctcttcgctatcgccaccaaaccattgagagtgttctctcaaaactagataacagtaagcatacattcaaattggttaagtcctcgatcgattagtatctgtcagctccatgtgtcgccacacttccacctcagacctatcaacctgatcatctttcagggatcttacttccttgcggaatgggaaatctcatcttgaggggggcttcatgcttagatgctttcagcacttatcccgtccgcacatagctacccagcgatgcccttggcagaacaactggtacaccagcggtgcgtccatcccggtcctctcgtactaaggacagctcctctcaaatttcctgcgcccgcgacggatagggaccgaactgtctcacgacgttctgaacccagctcgcgtaccgctttaatgggcgaacagcccaacccttgggaccgactacagccccaggatgcgatgagccgacatcgaggtgccaaacctccccgtcgatgtggactcttgggggagataagcctgttatccccggggtagcttttatccgttgagcgatggcccttccatgcggaaccaccggatcactaagcccgactttcgtccctgctcgacttgtaggtctcgcagtcaagctcccttgtgcctttacactctgcgaatgatttccaaccattctgagggaacctttgggcgcctccgttaccttttaggaggcgaccgccccagtcaaactgcccacctgacactgtctccccgcccgataagggcggcgggttagaaggtcaatacagccagggtagtatcccaccgatgcctccaccgaagctggcgctccggtttccaaggctcctacctatcctgtacaagctgtaccaacattcaatatcaggctgcagtaaagctccacggggtctttccgtcctgtcgcgggtaacctgcatcttcacaggtactataatttcaccgagtctctcgttgagacagtgcccagatcgttgcgcctttcgtgcgggtcggaacttacccgacaaggaatttcgctaccttaggaccgttatagttacggccgccgtttactggggcttcaattcgcaccttcgcttacgctaagcgctcctcttaaccttccagcaccgggcaggcgtcagcccctatacttcgccttacggcttcgcagagacctgtgtttttgctaaacagtcgcctgggcctattcactgcggctctctcgggcttgcaccctaacagagcaccccttctcccgaagttacggggtcattttgccgagttccttaacgagagttctctcgatcaccttaggattctctcctcgcctacctgtgtcggtttgcggtacgggcacctctcacctcgctagaggcttttcttggcagtgtggaatcaggaacttcgctactataattcgctcgccatcacagctcagccttcacgggaaacggatttgcctatttcccagcctaactgcttggacgcggatatccaataccgcgcttaccctatcctcctgcgtccccccattgctcaaatggtgaggaggtggtacaggaatatcaacctgttatccatcgcctacgcctttcggcctcggcttaggtcccgactaaccctgagcggacgagccttcctcaggaaaccttaggcattcggtggaggggattctcacccctctttcgctactcataccggcattctcacttctaagcgctccacaagtccttccggtcttgcttcacagcccttagaacgctctcctaccactgttcgaagaacagtccgcagcttcggtgatacgtttagccccggtacattttcggcgcagagtcactcgaccagtgagctattacgcactctttaaatggtggctgcttctaagccaacatcctggttgtctaagcaactccacatccttttccacttaacgtatactttgggaccttagctggcggtctgggctgtttccctttcgactacggatcttatcactcgcagtctgactcccaaggataagtcatcggcattcggagtttgactgaattcggtaacccggtaggggcccctagtccaatcagtgctctacctccgagactcttaccttgaggctagccctaaagctatttcggagagaaccagctatctccaggttcgattggcatttcacccctacccacacctcatccccgcacttttcaacgtgcgtgggttcgggcctccattcagtgttacctgaacttcaccctggacatgggtagatcacctggtttcgggtctacgaccacgtactcaattcgccctattcagactcgctttcgctgcggctccgcatcttctgcttaaccttgcacgggatcgtaactcgccggttcattctacaaaaggcacgccatcacccgttaacgggctctgactacttgtaggcacacggtttcaggatctctttcactccccttccggggtgcttttcacctttccctcacggtactggttcactatcggtcactagggagtatttagccttgggagatggtcctcccggattccgacggaatttcacgtgttccgccgtactcaggatccactcaggagagaacgaagttttgactacagggctgttacctcctatggcgggcctttccagacctcttcatctacctcgttcctttgtaactccgtacagagtgtcctacaaccccaagaggcaagcctcttggtttgggctggtcccgtttcgctcgccgctactcagggaatcgcatttgctttctcttcctccgggtacttagatgtttcagttccccgggtctgccatctcatatcctatgtattcagatatggataccactccattacgagtggtgggtttccccattcggaaatctccggatcaaagcttgcttacagctccccgaagcatatcggtgttcgtcccgtccttcatcggctcctagtgccaaggcatccaccgtgcgccctttctaacttaaccgttaaaaagaatcactacgtgatatcttgcattacaattgaatgtgaattacttctgttatctagttttcaaagaacaacatctcgaagaatcgaatgatccttcaaaactaaacaagacagggaacgtactgtttataagacccgaggtctaatattccgttaaaatccttagaaaggaggtgatccagccgcaccttccgatacggctaccttgttacgacttcaccccaatcatctgtcccaccttcggcggctggctccataaaggttacctcaccgacttcgggtgttacaaactctcgtggtgtgacgggcggtgtgtacaaggcccgggaacgtattcaccgcggcatgctgatccgcgattactagcgattccagcttcacgcagtcgagttgcagactgcgatccgaactgagaacagatttgtgggattggcttaacctcgcggtttcgctgccctttgttctgtccattgtagcacgtgtgtagcccaggtcataaggggcatgatgatttgacgtcatccccaccttcctccggtttgtcaccggcagtcaccttagagtgcccaactgaatgctggcaactaagatcaagggttgcgctcgttgcgggacttaacccaacatctcacgacacgagctgacgacaaccatgcaccacctgtcactctgccccgaaggggacgtcctatctctaggattgtcagaggatgtcaagacctggtaaggttcttcgcgttgcttcgaattaaaccacatgctccaccgcttgtgcgggcccccgtcaattcctttgagtttcagtcttgcgaccgtactccccaggcggagtgcttaatgcgttagctgcagcactaaggggcggaaaccccctaacacttagcactcatcgtttacggcgtggactaccagggtatctaatcctgttcgctccccacgctttcgctcctcagcgtcagttacagaccagagagtcgccttcgccactggtgttcctccacatctctacgcatttcaccgctacacgtggaattccactctcctcttctgcactcaagttccccagtttccaatgaccctccccggttgagccgggggctttcacatcagacttaagaaaccgcctgcgagccctttacgcccaataattccggacaacgcttgccacctacgtattaccgcggctgctggcacgtagttagccgtggctttctggttaggtaccgtcaaggtgccgccctatttgaacggcacttgttcttccctaacaacagagctttacgatccgaaaaccttcatcactcacgcggcgttgctccgtcagactttcgtccattgcggaagattccctactgctgcctcccgtaggagtctgggccgtgtctcagtcccagtgtggccgatcaccctctcaggtcggctacgcatcgtcgccttggtgagccgttacctcaccaactagctaatgcgccgcgggtccatctgtaagtggtagccgaagccaccttttatgtctgaaccatgcggttcagacaaccatccggtattagccccggtttcccggagttatcccagtcttacaggcaggttacccacgtgttactcacccgtccgccgctaacatcagggagcaagctcccatctgtccgctcgacttgcatgtattaggcacgccgccagcgttcgtcctgagccaggatcaaactctccgataaagtagtttgactgactacgcacatcgctgtgcgatttatttaaaactttgaattaacaggtacgttttgtcttgtttagttttcaaagatcattttgttcactttctcaagcaactttttaagtatataataagtttctcttaaagtcaacatgtttttttataaatggtggagcctagcgggatcgaaccgctgacctcctgcgtgcaaagcaggcgctctcccagctgagctaaggccccgaagtggtcgggaagacaggattcgaacctgcgaccccatggtcccaaaccatgtgctctaccaagctgagctacttcccgatttttaaaaatattatggcgcgcccgagaggagtcgaacccctaaccttttgatccgtagtcaaacgctctatccaattgagctacgggcgcataataatgaatgccgagggccggacttgaaccggcacggtagtcacctaccgcaggattttaagtcctgtgtgtctgccaattccaccaccccggcgtggatggtatagttggagcggaagacgggattcgaacccgcgacccccaccttggcaaggtggtgttctaccactgaactacttccgcatacaggataactatcctgtataatgcgggtgaagggacttgaacccccacgtcataagacactagatcctaagtctagcgcgtctgccaattccgccacacccgcgttacatggtgagccatgaaggactcgaaccttcgaccctctgattaaaagtcagatgctctaccaactgagctaatggctctttttaaaagacttgtgttattatcttgtccaaaaatggtgccggccagaggacttgaacccccaacctactgattacaagtcagttgctctaccaattgagctaggccggcaaatatggtggaggatgacgggctcgaaccgccgaccctctgcttgtaaggcagatgctctcccagctgagctaatcctccatatattacacttacgtgtaatggcttggcggcgtcctactctcacagggggaaacccccgactaccatcggcgctgaagagcttaacttccgtgttcggcatgggaacgggtgtgacctcttcgctatcgccaccaaaccattgagagtgttctctcaaaactagataacagtaagcatacattcaaattggttaagtcctcgatcgattagtatctgtcagctccatgtgtcgccacacttccacctcagacctatcaacctgatcatctttcagggatcttacttccttgcggaatgggaaatctcatcttgagggggcttcatgcttagatgctttcagcacttatcccgtccgcacatagctacccagcgatgcccttggcagaacaactggtacaccagcggtgcgtccatcccggtcctctcgtactaaggacagctcctctcaaatttcctgcgcccgcgacggatagggaccgaactgtctcacgacgttctgaacccagctcgcgtaccgctttaatgggcgaacagcccaacccttgggaccgactacagccccaggatgcgatgagccgacatcgaggtgccaaacctccccgtcgatgtggactcttgggggagataagcctgttatccccggggtagcttttatccgttgagcgatggcccttccatgcggaaccaccggatcactaagcccgactttcgtccctgctcgacttgtaggtctcgcagtcaagctcccttgtgcctttacactctgcgaatgatttccaaccattctgagggaacctttgggcgcctccgttaccttttaggaggcgaccgccccagtcaaactgcccacctgacactgtctccccgcccgataagggcggcgggttagaaggtcaatacagccagggtagtatcccaccgatgcctccaccgaagctggcgctccggtttccaaggctcctacctatcctgtacaagctgtaccaacattcaatatcaggctgcagtaaagctccacggggtctttccgtcctgtcgcgggtaacctgcatcttcacaggtactataatttcaccgagtctctcgttgagacagtgcccagatcgttgcgcctttcgtgcgggtcggaacttacccgacaaggaatttcgctaccttaggaccgttatagttacggccgccgtttactggggcttcaattcgcaccttcgcttacgctaagcgctcctcttaaccttccagcaccgggcaggcgtcagcccctatacttcgccttacggcttcgcagagacctgtgtttttgctaaacagtcgcctgggcctattcactgcggctctctcgggcttgcaccctaacagagcaccccttctcccgaagttacggggtcattttgccgagttccttaacgagagttctctcgatcaccttaggattctctcctcgcctacctgtgtcggtttgcggtacgggcacctctcacctcgctagaggcttttcttggcagtgtggaatcaggaacttcgctactataattcgctcgccatcacagctcagccttcacgggaaacggatttgcctatttcccagcctaactgcttggacgcggatatccaataccgcgcttaccctatcctcctgcgtcccccattgctcaaatggtgaggaggtggtacaggaatatcaacctgttatccatcgcctacgcctttcggcctcggcttaggtcccgactaaccctgagcggacgagccttcctcaggaaaccttaggcattcggtggaggggattctcacccctctttcgctactcataccggcattctcacttctaagcgctccacaagtccttccggtcttgcttcacagcccttagaacgctctcctaccactgttcgaagaacagtccgcagcttcggtgatacgtttagccccggtacattttcggcgcagagtcactcgaccagtgagctattacgcactctttaaatggtggctgcttctaagccaacatcctggttgtctaagcaactccacatccttttccacttaacgtatactttgggaccttagctggcggtctgggctgtttccctttcgactacggatcttatcactcgcagtctgactcccaaggataagtcatcggcattcggagtttgactgaattcggtaacccggtaggggcccctagtccaatcagtgctctacctccgagactcttaccttgaggctagccctaaagctatttcggagagaaccagctatctccaggttcgattggcatttcacccctacccacacctcatccccgcacttttcaacgtgcgtgggttcgggcctccattcagtgttacctgaacttcaccctggacatgggtagatcacctggtttcgggtctacgaccacgtactcaattcgccctattcagactcgctttcgctgcggctccgcatcttctgcttaaccttgcacgggatcgtaactcgccggttcattctacaaaaggcacgccatcacccgttaacgggctctgactacttgtaggcacacggtttcaggatctctttcactccccttccggggtgcttttcacctttccctcacggtactggttcactatcggtcactagggagtatttagccttgggagatggtcctcccggattccgacggaatttcacgtgttccgccgtactcaggatccactcaggagagaacgaagttttgactacagggctgttacctcctatggcgggcctttccagacctcttcatctacctcgttcctttgtaactccgtacagagtgtcctacaaccccaagaggcaagcctcttggtttgggctggtcccgtttcgctcgccgctactcaggaaatcgcatttgctttctcttcctccgggtacttagatgtttcagttccccgggtctgccttctcatatcctatgtattcagatatggataccactccattacgagtggtgggtttccccattcggaaatctccggatcaaagcttgcttacagctccccgaagcatatcggtgttcgtcccgtccttcatcggctcctagtgccaaggcatccaccgtgcgccctttctaacttaaccgttaaaaagaatcactacgtgatatcttgcattactaattgaatgtgaattacttctgttatctagttttcaaagaacaatatctcgaagaatcgaatgatccttcaaaactaaacaagacagggaacgttctgtttataagacccaaggtcttatattccgttaaaatccttagaaaggaggtgatccagccgcaccttccgatacggctaccttgttacgacttcaccccaatcatctgtcccaccttcggcggctggctcctaaaaggttacctcaccgacttcgggtgttacaaactctcgtggtgtgacgggcggtgtgtacaaggcccgggaacgtattcaccgcggcatgctgatccgcgattactagcgattccagcttcacgcagtcgagttgcagactgcgatccgaactgagaacagatttgtgggattggcttaacctcgcggtttcgctgccctttgttctgtccattgtagcacgtgtgtagcccaggtcataaggggcatgatgatttgacgtcatccccaccttcctccggtttgtcaccggcagtcaccttagagtgcccaactgaatgctggcaactaagatcaagggttgcgctcgttgcgggacttaacccaacatctcacgacacgagctgacgacaaccatgcaccacctgtcactctgcccccgaaggggacgtcctatctctaggattgtcagaggatgtcaagacctggtaaggttcttcgcgttgcttcgaattaaaccacatgctccaccgcttgtgcgggcccccgtcaattcctttgagtttcagtcttgcgaccgtactccccaggcggagtgcttaatgcgttagctgcagcactaaggggcggaaaccccctaacacttagcactcatcgtttacggcgtggactaccagggtatctaatcctgttcgctccccacgctttcgctcctcagcgtcagttacagaccagagagtcgccttcgccactggtgttcctccacatctctacgcatttcaccgctacacgtggaattccactctcctcttctgcactcaagttccccagtttccaatgaccctccccggttgagccgggggctttcacatcagacttaagaaaccgcctgcgagccctttacgcccaataattccggacaacgcttgccacctacgtattaccgcggctgctggcacgtagttagccgtggctttctggttaggtaccgtcaaggtgccgccctatttgaacggcacttgttcttccctaacaacagagctttacgatccgaaaaccttcatcactcacgcggcgttgctccgtcagactttcgtccattgcggaagattccctactgctgcctcccgtaggagtctgggccgtgtctcagtcccagtgtggccgatcaccctctcaggtcggctacgcatcgtcgccttggtgagccgtcacctcaccaactagctaatgcgccgcgggtccatctgtaagtggtagccgaagccaccttttatgtctgaaccatgcggttcagacaaccatccggtattagccccggtttcccggagttatcccagtcttacaggcaggttacccacgtgttactcacccgtccgccgctaacatcagggagcaagctcccatctgtccgctcgacttgcatgtattaggcacgccgccagcgttcgtcctgagccaggatcaaactctccgataaagtagtttgactgactacgcacatcgctgtgcgatttatttaaaactttgaattaacaggtacgttttgtcttgtttagttttcaaagatcattttgtctttcgttcaagcgactttattattatatcttatcaatctcttgaagtcaacaactttttaaatttctttttttcgtcagcgccttgtttagcggcaacgaataataatataccacctcacaaataatagtgcaatagtttttttaaagaaaatcaaaaagttttacgagcggcttgtttctaaaaaagcgccgtactgcgataagcagaaaacggcgccttcccttttattagcgttgtctcatttgagggaataataaaacgtctctgatagacggagcatttgttaacagcatgacaaggcggtcgataccgatacccaatcccccggtcggcggcatgccgtattcaagagcttcaacgaagtcttcatccatcatatgcgcttcatcgtttccttcttctctttcttttaattgcgcttcaaagcgttccctctggtcaatagggtcattcagctccgtaaacgcattagcgtgctcacggccgacgataaacagctcaaaacggtctgtaaagcgagggtcctccggatttttcttagcaagaggagaaatctctacagggtggccgtaaataaatgtaggctgaatgagtgtttcttcaattttttgttcgaagaattcattgatgatatgacccaccgtcatagagtttgtgatctcgataccatgctcttttgcatgaccgcgcgcttcttcaacagtcatctcattccagaaatctacgcctgtcgcttctttgaccgcatctaccatgtggagtcgtttccactcaggtttcagatcaatctgctcttcgccgtactggattgtggtgcttccaagcacttcctgcgcaatatgtgctacgaggttttccgtaagactcataatatctttataatcggcgtacgcttcatacagctcgatcatcgtgaattcagggttatggcgtgtagaaacaccttcgttacggaacacgcggccgatttcgtagactttttccaatccgccgacaatcaggcgtttcaggtgcagttcaatcgcaatacgcatataaagaggcatgtcgagcgcgttatggtgcgtgatgaacgggcgtgcagacgctcctcccggtatgctgtgcatcgtaggtgtttcaacttctaagtatccatggtcatctaagtatcttctcatcgcttggatgattttgctgcgtgtgataaacgtttgtttgctgtcagggtttacgatgagatcgagatagcgctggcggtaacgctgttcaacgtcttttaacccatgatatttatcaggaagaggacgcagtgcttttgtcagcagttcaaaagatgtcgctttgacagaaagctcgcctacgtttgttttgaaaactttcccggtgatgccgataacgtctccgaggtctgaagatttaaagatttcatattgttcttcgccgacactgtcttttcttacgtaaatttgaatttgaccttctaagtcctgcagatgcgcaaagccggctttcccttttccgcgctttgtcatcatacggcctgcaatggtcacttcgatcgctttttcttccagttcttctttagaaagctcctggtaggcgtcaatgatttgttgagattgatgcgttctctcgaaacgttcgccgaaagggtcaatgccgttttctctcagctggttcattttatctcgtctgacttgcagctggtcgttcaattcctcatgattttgctcttcttgactcattggtatcactccgttacattttgatttcacgaaaaagcagaaaaactgccagcggtaagctggcagtgagcagcaatagagggtgtatattaacctacttttgcatcttgaagctcttttgcctctgcttcggcggtaaatgcatctaaaagctgcacaaatttttcacgcgtctcacattggttaatttcattgcgtacattcgcattgcctctgacacctttcagataccaggcagcgtgttttctcatttctctgactgccacattttcgccttttaacttaatcaggcggtctaagtgcagtttgcataccgacattttttcacggactttcggctcgtcttttaactcaccggtttcaaggtactgcaccgtacggtaaatcatccacgggttgccgagtgcggcccggccgatcatgacgccgtcaactcctgtttcctcaagcatgcgtttcgcgtcctgaggcgttttgacatcaccgtttccgatgacgggaatggagacggattgcttcacttctttaatgatatcccagttcgcagtgccttcatacatttgcactcttgtgcggccgtgaagggcaacggcttttccgccggcacgttcaacggcttgggcgtttttcaccgcataaatgtgatcttcatcccaacccattctcatcttcactgtaaccggcttatcaacagcatctactactgcggataccatttcataaatcttatcaggatcgagaagccatttggcgcccgcatcacattttgtaatctttggtacgggacatcccatgttaatatcaataatatcagcagtcgtgttttgatctacaaacttcgccgcttccacaagggtttccttttttcctccaaaaatctgaaggctgagcggtttttcacgttcatcaatgtaaagcatccccattgttcttgcgttgttgtaaaggatcgctttgtcactgaccatttcagcgcataccaatccggctccgaattcctttacagtcaatctgaacgctgagttgcagacaccggccataggggcaagcacaacccggtttttcaattgaatatcaccgattttaaacatttttcccctcctttcatttgtctatttttcaggcggggccaattcgtccgcacttatatttaaaacatctgccgcatcttgaatgatggcatctgacggcaatcggtttccgcgttcaatttcaccgacaatagaaactgatatacctaatgcttttgcaaatccttcttgagtataacctttcagctttctgaatgcacgaattcgcctaccccagatttctgcttccatactcttacaccttcttggtttgtttcagcgcttatcgtgatatgatccgcctgcggacatatttcttttaacggcgcaaggacaaataagcgctcatacattctcggatgcggaacaatcagccgctctgtttcaatattttcacgattatacagcaaaatgtcaaggtctgccgtccgcggtccccagcgaatctctctcgttctgcctaattcagcttcaatggactgtgttacatctagaagttcaaaaggagataacgacgttttcacttcaaccgccatattgagaaactgatcctgatcctcataaccgacgggatctgtttcatatatagaggatatctttgacaccgtcacgccatcatgccgggtgagcatggccactgcctggcgcaaataatgttcacggtcgcccatattggaaccgaggccgatatatgccgtattgttcatgatttctttctcgtcatttctatggctactgatttataatggccgggaatcggcgggtcaggcttaacaacctttaccgtacattgctgcaccggctcaaatttctcaaggacggtgtctgcgatccgttccgcaagggtctcgaccaaattaacgggctcgccctcaacgatgccgcggcagacactgtacaattccgcatagttaatggtataagaaaggtcatccgtttttcccgctttgctcaaatccagttcggcagtcaggtctactttgaagcgctggccgagtttgttttcttcctcgaacacgccgtgatatccgtaaaactccataccttccacatatactttatccataatgcgcgcctcctttgttcagcatagcatccatcatcttagtcattcttgcgatctctttaacatcgtgcaccctcacaatgtcgcagcctttttggacgccaaggcatactgtcgctcccgttccctcggcacgttcttcagggggaaggtcaagcacacggccgatgaacctttttctcgatgtcgccaggagcagcggataccctaacccgctgaacacctccagcttgttcatgacagccagattgtcctcatagtttttcgcaaagccgatccccggatccagaatcatgttttcatctgtgacgccggcttctgcggcaatttttacgctttccatcaagtctgcaagcatatcaggaataagatcgttatagtttctttccatacgattatgcattaagataatcggaactccgtgtgcggcggctactgacgccatgtcagggtcacctttcgcccccagatgtcattaaggatagaggctcccgctttgaccgcttcgtctgccacggacgctttgtacgtatcgattgaaagcggaatgtccagctcgcttgtaatccgttctatgacggggatgactcgtgacatttcctcatcagccgaaacgagtgatgcgccgggccttgtcgattcgccgccgatatctatgatatgcgccccttcttcagccatcttcgccgcatgcagaagcgccctttccgtactgtcgtatttgccgccgtcagagaaggagtctggcgttacatttaatatccccataacgagcgtcttctctttataggacagagcgcctttttttgtatgaatcagtttaggctgttcaattgtttgctgcgccattttgttcctcctcctgtacattcattttgtttatttcctgccgatactgcttacggagcaattgcaccgttttcccgctcattccgggcagcggcacttcctctattttagaaaacgggatgatttcaagcacggagtttgtcaaccatgcttcatccgcttcaagcattgattgaaaacggaatcggccttcggtgacttctgtcccctgccgtttcaattcatcaatgacaaactgtcttgttacaccgtcgagaattcccgtatccaaagatggcgtaaagaccttgtctccttttcgccaaaacacgttggagacaatgccttccgcgacatctccttctccggtcaggaaaatcccttcaagattgggatcattcccgatctcccgtttagcgtacatgttgtttaaatagtgatgggattttaaccggaaagatccttcaggcgtatttctccggacagagagaagcctgccttctttttgaacaggcagagtttccggattgagccggttcacgaaacaaaggacggtcggcttttcataagtctgcgcggcaaatcccttatcgctgacgcctgccgagatgttaagccggacacgcgcgctgccgtcctttatgtcattgagaagcaacagtctccgaagcatatcaagcagctcctgtttgttcacctcgaatgcaatctgcagatcccgaagcgccctgttgagcctggcgacatgcgcatccggcagaaacggccggccgctgtaaagcctgaacgtctcgaacgctccgatcccgtacagataaccatggtcaaaaggagaaagcgccgcttctttctcctctatatattgaccattcaaatatataatcacaccgatacttcctttttgcggtgtgtctctataaagtttctgagcatctctttgccgaaggaggtcatgatggattccggatggaactgaacaccttcaacaggcagctcattatggcggatggccataatttctccttctttggtttgagcggataccgtaaaacaatccggcagcgtgtccgctttgacaataagtgaatggtaccgggtggcgaccagcggattttgcaggccgttaaaaatcgtctgtccgtcatgcataacttctgacgttttgccgtgcatgagccgctctgctctgacgacatcgccgccgaatacttgcgcaatcgactgatgcccgagacatacgccgaaaataggaatactgccggcaaaatgtttgatggcttcgaggctgatccccgcttcatcaggactgcacggcccgggagaaatcattaagaagtccggacccagctcttcaatctgctcaatcgtaatctcgtcattccgtctgacgatcagttcctccccgagctcacccaaatattgaaccaagttgtacgtaaatgaatcataattgtcaatcattaaaatcatctctgctcacctcgtctgattttttgtctcttcttcgctcagctctaacgcctttttcatcgcaaaagcttttttgaacgattccttgtattcatgcttcggaaccgaatcaataaccactcctgctccggactgcataaaagcatgtccgccggctgcatagatcgtccggatcacaatgttaaactgcaaatctccgttgaatccgaaccagcctatagatccagtataaagcccccgtcttgtcggctcaagctcttctataatttccatcgttctcactttgggcgctcccgtgatggtgccccccgggaacaccgcatgaataatgtctgtcgcgtcatatccgtcctgcagctctccctgtacgtttgacacgatatgcatgacgtgggaatatttttcgatcgccataaactcgttaacccgcacggagccgtagcgcgatacgcgcccgaggtcattacgctcaagatcaacaagcatgacgtgttccgcacgttctttttcgttgtgaattaattcatcagccaaagccttgtcttcagcatcgtcttttcctcttgaacgcgtacccgcgatcggtctcgtttcaagcttcttccccttctttgtcaccaatagctccggcgacccgcatatcacttgaaaccccggtgtctcgagataggccatgtaaggagacggattgacgtttcgcaagtgtttatacacctcatacggatgaacggataaagactgagactgcctgatggacaaattaacctggaacacatccccgctcgcgatatattgtttaatttgttctacagcctgtgaaaatccttcctcggtgaacggagcggcgtacgatccgtccccattccgattcagcggtgaaaaaggctcgtccgccgtttggagggaacaccacatgtcctctaagccggacagcttttcttccgcaagatccgcttcttccgcttcagtatgggtaatgagccataacgcctcttcctcatggtcataaacggccacatcatcaaaaacaagaaagtaaatatcaggtgtttccagatcatctaacgacagcatcttaaaattctcaatatatcgggcatagtcgtaactgataaaaccaatcgcaccgccctgaaagtccggaaactcaacgtttgtttccgttccgagcgttccaaaccattcatgaaaggcccgcagcgggtcaccttctttaaacagtgtttctccctcatgcttgatcgttgtaattccgtctttccctctgacggacgcaatcggatctagaccggctatactgaatcttccccctctcgcgctttcgagcagaacatgccgttttctcgatttcgaaaggttttcatatcgctgtaaaaatgcttgtttcgtaaaaggtatttttcttcctgccggtctgcgttgtgccatcatatcaatcctctgcttcgttttactgtagttttattttaaagcaatcacactggtgaaaaaagtgaatttcacttccaaccataaaattcgaaacgttttttggattttcgatacttcaggcacaaaaaaactcccggatacagccgggagccgtgtgtatgtctctattcaaactgataaagcggtgtgcttaagtaacgttctccgttactagggatgatcgcaagcactttcttgcctttcccgagttttttcgcgatttccagtgccgcgtaaatggccgctccggaagaaataccgccgagaatcccttcttcttttgccgttttacgggcatattcaaatgcatcctcgtttttgacgggaatgatttgatcatagatgtccgtattcaatgtttcagggacaaatcccgctccgataccctgaattttatgcggacccggttttccgccggaaagaactggagaatccgccggctctaccgcatagattttgatggatggatatgcttttttcagcacttcgcccgctcccgtgatggttccgccggtaccgattccggccacgaacgcatcaagctggtcgtcaccaaactgttctacgatttctttccccgtcgtttggcggtgaatttccgggtttgccgcattgttgaattgctgaggcacaaagtatccgtgttcctccgcaagttcttccgcctttttaatggcgcccttcattccttctgcgccgggagtcagcacaagctccgctccgtatgcgcgcagcagattgcgtcgttccatactcattgtatcaggcataacgagaatggctctgagacctttagccgctgccaccatcgcaagaccgattcctgtatttccgcttgtcggttcaatgattgtgtcgccggcttttaattttccttctttttcagccgcttcaatcatcgccgctccgatacggtcttttacgctgctgcccggattcatgtattcaagcttcagatatacatctgcactgttttcatccgtcaggcgattcaatttcacaataggagtatttccgattagttcagtaatagaatttgcaatacgcaccatgttggacacctcaatttccgactaaatttattggtattataaatataagttatcaatttcaaaattttttgtcaatcatttagttcttttttccccgtagaaccaagagacccccgcctctttccacagcgttttgactgtcgccttgtcacctaattgatccatcgcgatctggcgtctgatttgactcttcacttcattgtatgagaaagttctcgctttaagcttttctttcagctgaatgacggcatatcctgaagaaactttaatcggttcagcggaccattcatcttctttgagatttttagcttctgtgatatatgcctgcgggatattttcctggttttctgtcacaaagccgaggtctccgccatactgagacgtgtatctgtccgtggaacgctcagcggcgacggcttcaaagctggaaccgcctttcaaatcagcaagcaccctgtccgcctcttccttgtttttgacgacaatgtgcctgattctgtaggaatcatcgaaatggtacagttctttatttttattataaaatgattgcatttccttatccgatatatcgatgtccttcgtcagcagttcttcaagaagaatgttgtagcggatctggtctctccattctttttcggtaatatggctgtcttcataaaatgaattattcaccgctttgattaaaagaaattcacgttccaattcggtgtttgaaactgtgagtttattctttttcgcaagttcttccactacttgtgcattaatcatatcctccagagttgattttccgtactcgtcttccatctttttcatccagtcctgccgtgtgatatgtttatcaccgattgtcgcgatggattcttcagatgaccccgcggcttgggattttgttaacttatacgccactgctacactgcataccaacagcgccgctacaataatcgtcaaaagtgttctcgatttcaaaatctaccccatcccttttacaaaatagaacaacccgctaaagagctagcgggttgtttcgtcacgaagctcttccagttcttcttttgtaaataaatatttctcattacaaaaatggcaaaccgcttcggcttttccgtcttcttctatcatatcttgtatttcttttttgcctagtcctaaaatggccgtttcgaatcgatcttttgaacaagaacagtgaaatttgaccggcattgtttcgagaacgtccggtttttgacccagaacttcttctaagatttcttccggtgtcaggcctttttgaatcaattttgaaatcggttcgatttgagataattgcttttcaattgttgaaatggtttcttcatcagtccccggaagaagctgaatgatgaacccgcccgcagcgagaatcgtgttatcaggatttactagtacacctaccccgacagatgaagggacttgttcagaagaaacaaggtaatacgtgaagtcatcaccgagttcacccgagacaatctctacttgccccgtaaaataatcacgcaagcccaaatcttttacgacactgagtgttccgtcagttccgaccgcccgtctgacatccagtttcccttgttcattgaggtcaaaatgaacgtgcgggtttgatacgtatgctcttacctcaccctttgcgttcgcatctgcgacaatggctccgatcgggccgccgccttctattttgactgtcagcttatcttcacccttaagcatcgctccgagcatcagagacgctgtcatcgtccggccgattgcggctgatgccgtcggccacgtgtcatgccttctttgcgcttcatttaccatatctgtcgttctggctgcataagcccgcactttaccgtcatatgcaattgctttaattaaataatccatcgtttacctcctatatgtgacccacgcgatttcgctcataaatgatttccagcccttttaaagtaagaaacgggtcaacaatatcaatacagtctgattcgtttgcgattaatgacgcaagcccccctgtcgcaatgactttcggttcttgtttggcctgccatttcatccgctttacaatgccttcaacttgtccgacatagccgaaaaggatgccggactgcatggcgcttaccgtgtttttgccgatgatattatccggtcgggcgatttcaattctcggaagcttggccgcgcgtgagtacagcgcttccgttgaaattgtaatgccgggagcaatcgcaccgcccatgtattgtttgttttcatcaatgtagcaatacgtcgtcgccgttccgaaatcaacaacaattaaggggccgccatactgctggatcgctgcaacggcattgacgatcctgtcagctcccacttctttcggattgtcatattttatatttaaacctgttttcattcccgggccgacaacctgcggctcgatgtgaaagtattttgtgcacattctttctaaagagaacataatcggcggcactacggatgagatgataatcccttcaatctgttcaaacatcagtccggaatgttcaaataaggagcggagcagcatgccgaattcgtcttctgttttgtgcctgctcgtttctatgcgccaatgatattctaattccccatcatgatatacaccaatcacggtgttggtgttccccacatctataaccagtaacaacctctatcaccacttttgaatagtttctaatcataacattttcaacattctacaataccatacacgatctgcggctcttttgtaaacaaaacggaaccagtaaaaaaaccgccggtatacgccggcggttttcatatcagaaagcgaactattctttcggctcgtctttcttttcgtcttctgttttagacaggatgtttactttcacatcgtctttttgaagatggtcatctgagaaattgcgctcagggagttttccgtgatccacgagatgcttgatttgttccgcatctaatgtttccacatcaagcaatgtctgagcaatcaattcaagcttatcgcgattttcagtcaggatggttttcgcacgctcataacattctttaatgatgcgctgaatttcctgatcaatttcgtaagcgatctgatcactgtagttttgctcgttgttgaaatcccggcccaggaatacttgaccgccttgagattgaccgaactgaagcggtccgagtttttctgacataccgaactctgtcaccattcttctggcaatgttcgttgcccgctggaagtcattgtgagcccccgtgctgacttcgccgaagataatttcctcggcaacacgtccgcccagaagaccgacaattttatcgagaagttcaggttttgtctggaagtaacggtcttctctcggaagcatgactgcgtatccgcctgcctgccccctcggaacaatcgttactttatgaaccatatcggcttcatccagcacaagtccgataacggtgtgaccgccctcgtggtacgccacgatattgcgttcttttttcgagatgacgcggctcttcttcgcaggacccgcaatgacacggtccgttgcttcatcaatgtcgcgcatatcaattttcttcttgttttgacgggcagcaacgagtgccgcttcgttaagaaggttttctaaatctgcgcctgagaaaccgggtgttcttgaagcgattgcttttaagttcaccgtctcatcaagcggtttgtttctcgcatgcacctgcaatacggcttcacggccgatgacatccggacggtctaccgtaatctgacggtcaaaacgtcccggacggagcaatgcagggtcaagaatgtccgcacggtttgtcgcagcgataataatgattccttcattcgcactgaaaccgtccatctcaacaagcagctggttcagcgtctgttcgcgttcatcatgcccgccgccaagaccggcgccgcgctgacgtcctaccgcgtcgatctcatcaatgaagatcaggcaaggcgcattctttttcgcattttcgaataaatcacgcacacgggaagcaccgacaccgacaaacatttcaacgaagtcagatccgctgatgctgaagaaaggaacgccagcttcaccggctgaggctctcgcaagcaatgtcttaccggttcccggaggtccgacaagcagcacgcctttagggatcctggcgccaagctcggcgaatttgcggggatctttcagaaactcaacaacctcaacgagctcctgcttctcctcatccgcgccggctacatctttaaacttcacgcgtttcttttcttccgtatacagcttcgctttgctctttccgaagttcatgacacggctgccgccgccctgagcctgattgagcaggaagaaaaacagaataaagatgatgacaaacggaatgatcgtcgttaagaacgtcacccacccgcttgtttcctgtgcgggatcaacttttacgtccgtctttttaattgcgtcaaatatctggtctgctccttttccttcaggaacatgtgttaaaaagtactggtctttgtcgtattttttcagctgtccttttacctcataaacacctctgacaggctgaaccgatacgctatcaactttcccttcatcgaggttcttgataaacgtactgtacgacatattttctgttttcgggtttgaggtctggaagtaactcacaaccccgattactactaataaaataagtaaataaaaaatggtattacggaagacccgattcattccttacctcctcccacagtaagcacaactatgttcaatagtaccatagaaaatcattccaatacaaccgataaccatctcggaagcaggcagccgatcagctttcataaatcgccggttttaatactccgatgtaaggcagattgcgatagcgctcggcataatcaagtccgtaacccacaacaaacgcgtcaggaacttcaaagcctacgaagtctgctttaatgtccgcttttcttccgcttggtttatccaacagggtaacaatcttaattgatttcgctttacgatatcggaagagttctacgagatagctcaaggttaacccactgtcgataatatcttcaatgattaagatgtcccggccttctacagatgtatccaaatctttgatgattttgacttctccggaagaaaccgtggaatttccgtagcttgatacatccatgaagtccatttccaaatatgtatcaatatgctttataagatcagccataaaaggaagcgctccctttaacacaccgattgccaacggaaacgtgtcgctgtactcgcttgttaattgttctccaagctgttttactttctgctggatctcatcttctgagatcagcactttttcgatatcctgtttcatgttaatgcttgccccctacacttttcatgctgtctatattgtaatacaatgcggtcactgtttgaaatcacaagatcgtcaaagatggattttttcaagccaggcagccagataatttcaccgctcgcatccgttacaatcggccattcgtcccgatcccgcagaggcagtttatgatcaataaatatatcttttacctttttcgagccattcatccctttaagtttaatccggtcgccgatttttctcgtccggattgttaaaggaaattgcaccttatttctgcttgtcataaaaacagcattcccatttttgatatgagggtcagcctgatcggccacctctatcataaagccgttggggagaacagcagtctcgccttccgctccttgcagctgcagctcaaagggaaccttttcacattgccattgttcaaatgtaaacaaacatgtctgatatgatttgaccaccttcagccctttcggaaaatcaagcactcccgaggcgcttccattttccgcccattccagaaactgctgtatgtggcgggcggaaaacgacgatggaacgttttcataaagatagtttaatattagttgaactcctcttctttgtaaaggtatcggaagggcaagcaattgagaggaatcgacttcaaccgatgtgtcagacttgcttgtaataaccttattcattcgttctttcgttaatgactgcaagtattgttcgtcttctgtcagtgcttcactcaccttttgaaacattttatgaacgtcaggtgattcttgttttaaaaaaggaagcacggtctttctgaatctgtttcttgtataatcgtcttttgcattgctctcatccgttctgtagctgagcccttcttgacggcagtattctaggatttcatccttttccgcatagaggaaaggcctgatcagccagccggatgcaaattcgcggacgggctgcattcccgcgagccctgcgccgagcgtacctttcgcaagcctcatgagcattgtctcaacctggtcatcgccgtgatgagccagcgccaaaaacttcgcttggtgttttgtcatcagatcttcgaaaaactgatatctgcaatcacgcgcggcagcctgcttgttcagcttattcttctttgcgtatgcagaaacatcaatctgtaccgtttcgcagaggatgtgttccgcttcgcaatatgactgcacaaacttcatatcttcttcagattcaggacccctgaactgatggtcgacatgcgccgctatgataacggaagaatgcccgaagtgcttattcagcatactgagaagcgccattgaatcagggcctccggagaccccggcaataatcgtttctccctccgcctgaagatgatatgttttgaaaaaatcttccacgcttttcacaatgtcccctcacaatgagcaggtttttttaaagatatacatatcctatcactttcattccctccaagcaaagaagaagcatgagcgcaggcgtccggccggcattagatgagaaaaaagacgatgtaagcgaaataaagggcgagaacgctgattaaaataagcgttgtttcaaacaaaccattgtgctttgcgggtttttgtttaggtttataccgcgtttgagatacagtgccctgccgcggttttgattgcggcggcttaggcttggcggcggctttccttttactcccggcgctctgccccgccgtcaggatgtcatgcttcatggcttccgcagacggatattggccgtttaaagcagaaaacagaaccttcttatacttattcagaaacgggtggccttcaatgatagaacgaagctgttctttcggctgtcctgactttttgcactctttcttctggacacagtggatcatgatcattgcgacagcaaacaggtcataggatggttctgcttttcttgttccatacccccaatagccctgtcgtaaaactccgtatactctttaatcgcgcggccttgttttgtcgttccccctacatcaatgcagcggatggcagccggcggtccggttacaataagattttccggtttgaggtcgccaaaaacccatccctgctgatgaaggactgacaagctggaaagaagctgcaccatcagcaccggaatccactccgctcccttactgctgatatattgcggaagaagcggcccttctatgtactccatcacgtaaaaagagacatttttattcagctgcggaataaacgcatcgtccgcatcaaaaaaagaaggccccatcgtttgcgaccgggcctttgaaaaggattttaagacattcacttcagaggtaacagacatgctgtcgctgcttattttcaaagcgacctgtccgcctgatgcttctgccagatatacaataccgttagccccttttccaagctgtttgagcaatctgtaggatttgccgttccatttgccctgaattgccgtccccggtgccagactacatgccaaactcgttaaagcgtcgttcatcatctgccaacatgctccttcttgagcggattctctcaaactgctgcgtcgcttcccggatagcggggcccgtaggggtgataccgccggtcgacagcttcgcaaagagcgcagaaagggattcaagcttcggcgtccaattcagcacaagctcaacttcctggcttttcccgggaaatatacacatggcaaattcattttgtccggcccgggaatttaaactgatggaaagatcaatcagcgcttctttcaccgtcggcagtttcggcgccatactcgcactcgtatcaaccagcacaagcacctgcagatgaactgtttctccgagttcatcaaccacttccatcacttcgccgcgtttttccggagaaagctcttccatttcaacgtttttccctaagatttgtttaagctcttgattgacgacaccttgcagcgtctgggtcattgcttttttcgtcaccatttgaaccgtctgagacaattgtgacgcatatacaacttgatggacgccgccaccggccatggcgatgccttcaacttccttcattgcctcttggtcaatcgcgttttcttccataatccctataacattcaccgtaatcccctgctccttggcgaaagccgccattgcaatcgggtcttcaccatgattggagcagccatctgtaatcagcagaacttgatttaaatgtcccttattcacatacattcctcccggtgatacgattagtcccatcttcgccagaaggaaagtgatttatacgaaaggattaagaaatctcctttttattttggaataccgccggcaccggtatggaagcccatttcggcgtgttgtgatcaatccggacaacaaccaccgtcatatcgtcttcgatttggccggaacgcgttctgatgacctcttccattaatatatcagcgatttcctgcggatcttcggttttcagccctttcattttccgtttcatccacaggtcgtggttttcaacgtgcttcggtccttcaaaaataccgtcactcatcatgacgagcagatctcccgcttttaactgttcacttacaacctccacatcaaattcattgatgataccgatcggcagattgctggcctgcactttcatgacttgatctccccgcttgataaaactcggcgttgaaccgacctttaagaatttgcagcttgcatcctgaagatcaatgatagaaagatcgagagttgagtagatttcgtctgtcgtccgtaaagacagaatactgttgatcgttttgatcgctattttttcatcaatacctgattcgagaattttttcgagcagcttaatcgtttcgttgctctcataatgagccctcgccccattgcccatgccgtcactgattgcggccgcatattttctcgcccccagttccatcatgctgtagctgtcgccggagacaaggccgccgccttttgccgcatgagccgcgcctgtcgatacccggtacgatttggtcgaaccgaacgcaacatggctgtagccattcggatgagccgagtgctgttcgcttttgacaagtatctgctcctcaagaatgtcagacagcatcggggcgataattttctcactctcgccgtgtcctccgctgaacgggattgtcatttcgatatcaatattgccctgctccaagctgtatatctcgacatgctgaatctcgattccgaaatgctgaagcgcctctatcatttgttcttcctgaataaaatgctgctccctctcccgttttatttcccgagaaaagtccgccataacctcagaaacccccaacagctgctcggcaacaagcctcctgctgtcctgaacttttctcttcagtgtcagatgggcgtgatggtgggcaagttcgtcctcaatcagctcttccacctgtctggatttggaacagtgctgttgaaactcttttttcaatctgcggtttgaggcatactgcttttcttctgtttcatgcataacttgtttcattaagtcatatgttttatcaaagttttgaacccagcatttgctttttttatagcaggattggcaggaatgctcggtgattttgcttaaaaagagatccacttccccttcttccgcctgctcatcggaagacgtctgatgaaaggtggcgaagctctccgacaaggcatgaaacacattggagaactggtctactttctgggcggtgacatctctgattttcctcgcgtactgctgctgctcctgactgtgctcagcagtgcccggtatgtatcgcgccacctttttcgtaatcgattggggcgtaatcaaaaacaatacaacggcaatcaaagattcataaagagtggtcattaatccggcagacccttcaccatataatgaaatcagcagtgagccgatcaccaatccgactgcggcgccggctttctttccttctttcagcagcccgccaagaagcccggaaaacgcaagcagactcatttgatagagattcccgatattcgcaagcccgaggatcagtccggtcacaacaccgaccgtacagccgatgcttgccccgccgacaaaggaaaaactcagcacgacatagcgggccaggatatgttcagcctgcattccctgaaatgaaacaccggcaagcccggttaaaacggatgcgatcaagatcataaaacagatgatttcttctatttttaacgattgcttcacttttttgatcgtgaaaatcggcaggctttgtaaaaagatcagcgtcaaaataaaggccaggcccgcctcgacaacagccatcacataatcataggtggtaaaagcgccgctttcaaaataaacaaatccgattctcgcggcagccatagagaaaaacaccacgatcggcagcatcttcacccggtcctgcacgatatatgtaccgatttttgaaaatagagtgaagacggccaaagctgtgagaatcaataaagagtgtttcggcgaaatggttaaagcgcccgcaagtaaagacagacaagcatagaaggctttatctcttctgatcaaaagcatcgctccgaaaaacggcagtgcaaatggaagaacctcagataatatgaaagcccgtccaagtaaaaaaccgatcacgacataaatgaaacccttatagaaaaaaagtgaatgcgcttgatggactgtaagctttgccgccttttcaaaaaacgattgcagtttttccagagcttgtcccgccatcggcccgttcactcttctttccgctttttccattgctctcatcccccacctgttttattcgttgcttgtcattataaatgaaagcccagataggattttgtcaaaagaaggtaacaattccaaagaactcttcgacgctttctcccttgttcccctttccttttgtatttcctccgacatttctcaaaaagttgtctaaatatgaaaaaatcggcttctgcaacagaagccgattcgcttgatgacccgtacgggattcgaacccgtgttaccgccgtgaaagggcggtgtcttaaccgcttgaccaacgggccagatatatatggtagcggcggaggggatcgaacccccgacctcacgggtatgaaccgtacgctctagccagctgagctacaccgccatataggtgcttataagcacaagttatataatacaaaggtttcttcattccgtcaacagaaactttaaagttttaattttctgactacatgcgcgtatacaaaaaaagcacccgctgggatagacggatgctccatgtatttatagaaagcagcaagttatcctcttcttgctccgcgccctccacgttttgattccgtgtttcgttttaaagatgataagcggtcttcgctatctttaagaaacttgttcattttctgttcaaaagattctttcggacggaaatcatttctaggtctggcttgcggacggtctttagcttttttaattgataaaccaattttcccgtctttttcaacgttgatgactttcacttcaacttgatcgccgacttttaaatgctcgttaatgtcttttacataattatcggctacctcactgatatgaacgagaccggttgagcctccaggcaattcaacaaatgctccgaaatttgtaatacctgttattttcccttgcaacttgctgccaacttcaatcgacataaaaaaagtgctcctccttaggcttataaaaagatcgtttgtttaattatacctaaataaaaatttaagtgtcaacaaggctacttgctcttcttttctacattaaagagaatctcaccatttcctgacataaacaagtctcttctggcaagctctgtgacgtaatcctcatcctttaatttggaaatttcatcttttaaatcagcctgtttcgcattcaattctttaacttgtttttccagctgagcctttttttcttcgtttgcgctaagggaagaggtctgtgaccacagagaacccgctaagacaatagccgtcaacaacacaagggcgccgaatacgatcaaccgtctgaaaagccctttccgccttcttttcataagctgggattgccgttcaacctgctctttatagtcgttttgaatttcagttattgtacgttccctagatagattcaaaccagacggtcctcctttcaccttttcaaaatacgtatcatggtcgatctgattgttatgattagtttcttgctcttttgtaaaaatcctgcacttttttgaaaatatcgtttgaaagtaagacgccacttttcaggaagaagtttcaataattgtttcaacaggaaaaacagcggatacagcaaaaacgctacgatcttaaaaagacacttcgcaaaaaaggcactcacccgataggagtataaagaaataaccgtgatcagcccgatgagcagcttaaagagcagaagcaccggacggaacagcacgtgctgaatgagcttttttgcgaattggtaaagagacaccgcaagatgaatggcaaatttcagtatttttatatacattcgtttaaacaggctttggtacgtcgcaatacccagtaagacagccaagaaaatgtataccctgagttccccttcattcacgttgagcagcacatagaaaaacagcagaccttgtacaatccaaaagagaatgtcatgaatgaataacagccatctggccgttttggcgcggctgacaaacagcctgtatgtatcaagcgacgctccgagccaggcgcccataccggtcattgccagcatcgtataaaattgggtcgtcagcgtcatttaaacaacttgctaaaaaaccctttagctttatccccttgctgctcgtctaaatatacaaggtcaaacaccctgccttttatagatacaatccctttttccacatcaaggtttttcatctgcagattctcgcctctgacggaaagcattcccataaccgtttccagcaaaaactcttcgttatcaaaactttccacatgcttgacgcccgaaatgtctaaatgctttctccctttcatcgttacatcatgctgttccggaacagaagaagaacctttttgctcataatatgaattcatctattcagcccccatatcctcgatacttttagcattattactgcattgtatgaggcgggagccttgtttagaacaagcctattcgccgagtttttcttctttgacgattgtatacatgcccgcggcttcttcttttttcgttgtttctttcaattcatttaccttcacggtgacaagcttctgcccgaagcggaccttcagttcatcaccggcttttacgtctgagctggctttcgcctgattcccgttaacggtgattctcccttgatcggcgacctctttcgccaatgtgcgtcgcttaattaatctggatacttttaaaaatttatcaagtctcatatcagaatctcctctccatttcttttgcttcatcccacaatttgtccatttcctcaagtgacattgcggtcaattcaaggccctttgctgccgcttctttctcaatataagcaaagcgtctgcggaatttgtcatttgtcatggcgagcgcttcctcaggctcaattttatagtatcggccgatattgaccaatgcaaataaaacatcgccgaattcagcttttaagctgatttcatctgctgattcggcggaagcctctgcagaaaattccttcagctcttcatttactttatcccatatgtcctgaacgttatcccagtcaaagccggtttttgcggcttttttctgaagcttggcggctttcgcaagagaaggcagtgttttcggcacggcatccagcaatgaagaggatgttgtttgcttttccgcctttttgatttcttcccagttggcgacgacatcatgttcatcctgaaccttaacatccttaaacacatgcgggtgccgtctgaccatcttcgcactgatgtctctgatgacatcatcaattgagaaatacccctcgtcttctccgatctgggcgtgcagcataacctgaagcatgacgtccccgagttcttctatcatgtgatccgtgtcctcttcgtcaatggcctcaagcagttcgtagcattcctcaatcatatatttctttaatgactggtgtgtctgcttttgatcccacggacagccgttcggcccgcgaagctcgcgaataatacttcggaatgcagaaaattcctggtaaaggagttcttcttttttaatcggcggaacatacacgcttgttaagttatttatttctacattgcggtcaagttcaaacaaaggcaccttgatcatcttttctcccttgctcccggctgctgtaacgatgaccacttcatagtcgtcaggcaatttctccatgagcgtcagcttcacctcagaggccgtcatttggtcataaacctggcagatgatcaggtgatgccggagttcgagctcatccggcgtcattgtttgcgcatccgtaaattgaaacccttcaatcggatcaattcgcaacgcattaaaagtggcatccagaaagctttgccctccagcggtatgaacatctatctgttgttcttcccggcgttcaaataacagctgaacggttttctcagcgacaaacggatgcccgggtacagcgtagacgacatcctcttgcttcgctttttcaaacagaatgtccgcgatctcttcatagaccgcttcaaactgatcatgtttttcataaatatcatcaaaataccggatgtccgcttccgtctcttgctctaattccgaaatcaaagggtggtctttcgttcttatatataaatgcttcgcctgagtcagcagcttatgtacgcccactgtcaactgatccatgtctccggcgccgaggccgacgaccgtaatattacctgccatgtttttctctcctctttttcaatttgcttaaagcactgccgaaaggaagaccgctcagctcttcgtccgtgaaaatcttcattcttatcatacaataaataaacaatagccctccgatgattgacgcagacagactctcacatacagctccgcccctgctgacaggaacaaataactgccaaagcttcatgtatacgaccaaaaagaagaccatcagcagactgcaccagcacagacgggcaatcacgcctccgatattcgtcagccatcccttcgaccaaattctccggagattcaggcacgcaactgcggcaaatgccaagacggtcgccagtgccgctcctgtaataccccagccggggaccagccaaacattcagcacccatttcagcgcccctcccgccaaaacggatacggcggggaaaacggtatgtcccgctccttgcagaattgcggctgccgtaagcgcaatcgaggcaaaaaagatagataagctgaatatttgtaaggtcggcgtcccctcactgttttggaaaagcatgatattcaccggttctaaaatgcaaaaaagcccggctgatgcaccgatccctaccgcaaggcagagcttgacggcagatgacgctttctcttttatgataaacggcttgttctcatgcaccgcttttgaaattgaaggaaccaaggacgcggcgatactgacggcaaacacggttcccagctgaaggagcggctgtccgcggtcatatatgcctttcagctgtttcgcggcatggctctccgtcccgtctgaaagcagtgaatataagtttaaggcgtctacaagctgaatcaaaagcatgagtacactgctgatacagatggtgactgaataaagcagcagcttttttacaatgacggccgtttcgatatgtccgccgtctttctttgtttcttcccgcttataccagaaaacagccaatacacaaagggccgcaaagctcccggcaattgatcccgaggccgcccccgcacccgccgcgtataatgaacgcccgcttttcaaaagccagaaggataaaccgagaagcaccgccacccgaagaagctgttccgtaatctgggataaggctgacggcatcatatcatgcacgccttggaaatacccccggaaaaccgccgtaaacggaaacagtatgaaagcgaacgccgcgacccttatcagcatcacaaggcgggcatcacccataaaaccggccaacggcgccgcgccggcatacatgagcgcaaacagaacaagtccggccgccgtgacataaagggcggaaattttcattattttttgtttatgatcgctataatcgttcattaattttgagatgatcaccggaaaaccggatgttgacagcatgaccgcgatccctaaaaacggatacacctgctgataaatgtaaaatccgacgtcaccgacaatattctgaaaaggaaccctgtacacggcgcttaatatcttcgtcacgatgcccgcaacgacgagcacaaaagcacctttccatgccgattgccgcttggcgccaactgaatcgttcatccaaaagctccttccagccgctagaaaattacgtctataaaacgagcttattatatcacaatcctaacggccgaaccgatagagagcacatatgaatatgaaaaagaacagcacttgtataagagctgttctttccccgttttcttatttcaataatggtaataagacctactgctccatttgtctcgccaaaaaactggctgccgtttctaccgctttatgttctacttctccaagcgcctgttccttggaaaagatgaccacggcaccgataggatcgccatttgccacgatcggagcgattgtataggagctcatatcttcatcaatgtcattcacaagctgcgcggacttcacgtcgttttctaccactgagctgcgctgatccatcgttttttcgagcaaatcgctgatggctttattcagaaattcttttttcgaactgcccgaaacggcaatatacgcgtcacggtcgcaaatcaagacggaatggccgagactgtcatacaatgcatctgcatattctttcgcaaaatcgccaagctcactgataggagaatattttttcaatataacttctccgtcgcggtcaacgaatatttcaagcgggtctccttccctgattcgcagtgttctccgaatttctttaggaatgacgacccgtcctagatcatcaatacgacgtacgatacctgtagctttcatctctctggtgcctctctttcatgtgatgatatttaagggaaagtactaaagctctttactttatgtagcttccgccactcgcttgaaattagtatccgtcacatcaaatgtaatatacaccagagagtaacaatttttatgaagacgcgattgtttctttcttcacattctgaaggcctttcagcatgccgagcacggtctccagccactcttccgttttgcggcctttcgtctgtactgagattttcagctttttcccttccattcccagtccgatctgccggccgtatttattgccgagttcgaataatttctggccgtcaatctgtgcgctggcctcttcagaaatggtaaatctgatcgcgtctttatcctgcttgatgagttcgacgcgttcatattttccgtataccttcatctcagcaaccgtaaacagccattcaacttctttaggatagctgccgaacctgtcgatgatttcatcttggagctcatttttctcctcaattgtggcgattgatctgaagcgtttatacatgtcgattttttgcttgccgtcttgtatatagttttcaggaatatacgcgtcaagctcgatatcgatttctgtctcaaactgttcgcttttcggaatatcgcctttccgctcttcaatcgcttccttgagcatttgcgagtacaggtcaaaaccgactgagtcgataaagccgtgctgctgggcgccgagaaggttccccgctcccctgatcgtcaagtcacgcatggcgattttaaagcctgatcccagctcggtaaattctttaatcgcctgcagccgtttttccgccacctcagtaagcactttgtctctgcggtacgtaaaataagcgtaagcgacgcggttggaacggccgacccgtcctctcagctgatacagctgagacagccccattttgtctccgtcgaacacaatcaaggtattgacatttggtatatctacgcctgtctcaataatagtcgtgctgacaaggacgtctgattccccttccagaaaattgagcatgacgctttccaattcattttcggtcatttttccgtgggcatatgccacttttgcatcgggaacaagcatggaaatttcatcagccttccgctcgatgtcatccacgcggttgtacaggaaatatacctgtcctccgcgcgccagttctctttcgatagcttctcgtacaagcgcgccgttgtattccacgacatatgtctgaacagggaaacggttttccggcggcgtttcaataacggataaatcccgcacaccgagcatggacatatgaagcgtacgcggaatcggcgtcgctgtaagagtcagtacatcgacattggctttgatctgtttgattttttccttatgcgttacgccgaagcgctgctcttcatcaatgatgagcaagccgagatctttatagacgacgtctttagataagagcctgtgggttccgattacgatgtctaccgttccgtttttcagtcctttaatcgtttcattggattcttttctcgttctgaatcggctgagaagaccgatgttaatcggatagtcctgaaaacgctccgtaatggtttcataatgctgctgcgcgagtattgtcgtcggcacaagaagcgcgacctgctttccgtctgcgatcgctttaaaggccgctcggatggctacctccgtcttcccgtaacccacatcgccgcaaagcaaacggtccatcgggcgttctctttccatatcctttttaatctcctgaatggaacggagctggtcctctgtttcctggtaagggaaagcagattcgaactgccgctgcatttcatgatcgggcgagaacgcatagcctttgcttgcttcccgttccgcataaagcttaatcagatcatcggcaatatcctgaacggagttttcaacttttttcttcacccgtttccattcactgccgcccagtttataaagcttcggttcttttccttcagagccgacatacttctgcacctgatcgatttgttctacagggacatacagcttatcgctgccctgataatgaatgttgaggtaatctttatgaatgcctttgatttccagtgtttcgatccccaagtacttaccgatcccgtggttgacgtggacgacatagtcaccgacctgaagctcggaatagcttttgatccgttcggcatttgtcagcttctgctttctcggctttttcttgattcggtttttgaacagctcttcctccgtaatgacggccagcttcatcagcggcagttcaaaaccggattgcagctcgccttccatgacatagacctgtccttgcacaagcgctttggagctgtccgttttcgcggcttcaatttcgtaatcagccagcacggatgccaatctgtcggttctgtccttatttgcgcctaaaaagacgacggtgaagtttgatttcttaaagcgctccatttcacctgagaggacattcatctgcccgtgaaaactctgcatctgccggcttgtcacattcacgatattctgagggcttgtatgctggacatgacgcaaaaataatgaataataaatagccgggcgccgcttttcgctcataagctcctgaaagctgaaggataaatgaatgtcatgcagaattttcccttcctcgagcagacttgtcgtaaattcggcctcttctttttgcagctgatcctccatttcatgaatgcggctgacctcgtctaacaataacaacgtgtctgccggtgtataatctagcaaactagcaggtttttcgtaaaagtacgagagatacttcacaagttcctgatcagtctgtcccgttgataaccgttctttatcatgtgagatattgatatgaagcatttccttttgtttgtcctgcttcagctttttcagactgtcggcaagccctttatcgagcctttccattgcccgggctttttcttccgccctgatgatcaattccttcgccggtccgatcgccacatgtttgagcgtctcgattgatctctggtcatcagaattgaagcttctgatggaatcgacctccgtatcaaacagttcaattcgcaccggatgctccgacgtcagcggataaatgtcgataattccgccgcgaatactgaattcaccgggtgcagaaaccatatcggaacgctcataccccacctctacaaggcgcgcggacagctgatccggttctatatcgtctccgagtgaaatgacgagctggctgcttttccacagctccttcggcggaagcattcttctcactgccgcaacgggcgccacaacgaccggcgcttctccgtttgttaatctattaatgacatcaagccgctgagcgcgcagttcaggactcgctaccgcaatttctgaagaaatcaattcattcacggggtataaaaaaacagattgatccccgagaagcgccgtcagatcttccgtcactttttgggcctgatataaattatgggtgataaagaaaatcggccttttcgtttcctgtgcaagggcggaggtaaaaacagaacgcgcggaacctgacagacccgcaagcagctgttccttcagcccctcatgtaaaccgttgacaatggatttaaaatcatcgctttctttaataaaggtttgaatgttgtccatatgggccctcctctctattttctgcaagaacagaaaaacgctttggtctagaatctacaccaaagcttcttattgaataaatgtgttgtgttcatggtagtgcggattgcgttccagcgcctcttggcagtcttcacaaattgtaagaacatggacatctccattgtctttatatgaaatcatatcgtttctttcctcatttgttaagtgctgaaatccaagtgactgtgtcggcaccgttgaatattccaggctccctaccttaaagccgcagtggcggcagaaataatgcaaagccatacgttggacctcctgatgtgaaaaaatcatttttccctagtatggtctcccattatttatcttatacatttgcattaaattcgttcatgacttctaaaaatggtttcgttaaggaagcttcgcaggcttttacggtttttgagacggcatcattgatatgcggcgcttcttccttcgtaaaagctcccagtacatagtcaacgactttcattccgttaacggggcggccgattccgattctgacccggtcaaattcaggggttccgaggtgctgtataagcgatttaattccgttatgtccccctgcgctccccttcgtccgaagcctgatttttcccgtcggaagatcaaggtcatcgtatatgactttcagatcttcatgatcggcatcataataatccagcagcggccgcaaacattctcctgataaattcatatatgtaagcggtttaacaagtagaactttttttccggaaacaaaccccattccgtaaagtccgttgaatttcgttttattcagttcaatattccattctttagaaagctcgtcaatggccataaagccgacattatgcctcgtgttctcataggtttttcccgggttaccgagaccggcaatcacaagcatcgtaaatcctccctcaacatcgctgtaattcttctcattctagcacaaaagacgtaacctcgggcgggttacgtcttaaagcgcttattgattttctccttcgggctcttcctcaggagacggttctgcatcttcttcgaatgcttcctgcttaggaggaaggatggaagccacgacttcttccgggtcgtttgtaaatgtataattgccgtcagcagtcagatctgcgatggtcagcacatcattcatttcaagcccggaaatatcaacattaattgtctgagggatgtccttcggcttagccttgatcgaaagctcatgcagcggctgctggataacgcctccgtctttgactcctttcgcctctcccgtcagctgaatcggcacctcggcctcgagctcctcactcatattcacgacttgaaaatcggcgtgcgtcaattcgtttttgagcgggtctgtctgaagatcagtcaccataaccgattgctgatttccgttgacatcaattgtgataatcgtgttttttccttcgtcccgcaatgttttaagcaattcgacactgtctaaagagacaggcgtattcgttatttctttaccgtatataatccctggaacatgtcctgaatgacggattttccgaagcgtcgaacgtttaaaatctgttctttcatttgcttttaaagttgccatattcagcaccatcctaattatcgttttatcgtcctattagaacaatacccacaataactgggatttaaaccttaaagtttcggtttagctgaataaatagctgacagattgtttctcgtgaacgcggataatcgcttcagccagaagcggtccgacagaaagctgcttaaagcggtcgatttttttctcatcaggaagcttaatgctgttcgttacgacaagctccttgattttagagttattgatccgctcaacggcagggcctgacaatacagggtgcgtacagcatgcatacacttctgcagctccgttttcaaccagcgcgttagcggcaagtgtgattgtgccggccgtatcaataatatcatcgatcagaatcgctgtttttccttccacgttaccgacgatgttcatcacttctacctcattcggtctaggacggcgtttgtcgataatcgcgatcggcgctttcagacggtccgcaagtttgcgggcgcgcgtcacaccgccgtggtcaggagaaacaataacgatatctttcaagtctttaccttcaaagtaatggcctaaaatcggaacacccattaagtggtcaatcggaatatcaaagaaaccttgaatttgcggcgcgtgtaaatcaagcgcaatcacgcgtgtcgcacccgctgtttcaagcaggtttgcaaaaagttttgccgtaatcggttcacgtgatcttgcttttctgtcctggcgcgcataaccgtagtacggaatcacaatgttgattgttttcgcggaagcgcgctttagagcgtcaaccataatcagcaattccataatgtgctcattaaccggcgcacttgtagactgaatgatatagcaatcacagccgcgaatactttcttctatgttgatctggacctctccgtcactgaatcttgtaacagagcactttcctaattgaacccctacattatccgcgatttcttttgcaagttctggatttgaattcaaagaaaaaatctttaaattcttatctccgtattcgttagacatggtaaacctccgattttaggattattttttatgaatatttttcacataatcttctttatttacttgtcttgctctggcaatggcaagcgcttcgcccggcacatcttcagttacggttgaacccgcagcgacatacgcgccttctcccactgtgacaggagcgaccagattggagttgcagcctataaaagcgccgtcttcaatcttggttaaatattttttcttcccatcataattgaccgtgatggagccgcagcccagattcacatccgtgcccacttcggcatcaccgatatagcttaaatgagatgctttgcttcggtcgccgaattgtgttttcttgatttcaacaaagtttccgatcttcacttcattgccgattgcggaatcgggtctgatgtgagcaaaaggaccgatatttacatcattcccaactttgctgcggttgacaacggattgtttaatcacagtgcggctgccgattgaactgtcctctatctcagtgtgagggccgatgacacattcatcgccgatttcagcttgtccctttaacacagttccgggataaataactgtatcttgtccgatacgcgcgtcaggtgagatgtacgtattcatcggatcgattaaagtgactccgttctgcatatgccgtttgttaatacgctctttcatatacatttcagcctgagaaagagcgactctatcattcactccgagcgtctcttggaagttaccagtctggtaagcggcaacagtttcgccttcgtctttgaggatttcgatcacatccggcagataatactcgccttgggcattttcattcgaaacctgttcgatgacacgaaaaagagcctcgttatcaaaacagtacgttcccgtgttgatttctttcacaagacgttcttgctccgaagcatccttgtgctccacgattttttgaacggcgccgtcttcactgcggatgattcttccgtatccggcgggatcgtcggcaacggccgttaacaccgtggcttttgcacctttgtctgtatgttcattcagcatggcttccatcgtctccgccgtcagaagcggtgtatcgccgcaaataacgatcgtgacacccttttctccgtgaagaaatggttttgcctgcttgaccgcatgagccgtaccgagctgttctgcttggagagcgtaatcgcttttctgtccgagctgcttcttcacatcttcggcgccgtgtcctacgatggtgacaagcttcgctaaagataatttcagagcttcgtctgcgacgtgctctaccataggctttccgcataccggatgaaggaccttataaagcttcgatttcattctcgttccttttccggcagctaaaatcactgcaaaccgcttatccatttaatggcctccaatatcccttttatccatagaaaaatatatcctaaatagctgttgatttcaagaagacatcaaaaagtgcaagaattttctatgtaatcgctttattactgaaaaatcagatttaaaaaaggactgccggaaaaggccttgtgtcagcctttatcagcagtccttacattttgttatgtttaagaagccccggcttcttcatattctaatgcttcagaatcacccaaacgatgatactcatttaaaacagcatcctggatcttgccccgcgtgctggaattaataggatgagcaatatcgcggaattctccatcaggggtgcgtttactcggcatcgcaacgaaaagaccattgtttccatcaatcacacgaatatcatgtacgacaaattcgtgatccagcgtgatggatgcaatcgctctcatgcgaccatcggtattcacgcggcgtaatcttacgtcagtaacttccacagtagttcaccaccttttccctatataaaagcattagtctaacaattccacgattctttttaaattcctgcacgtttcaaaaagtttttttgaaaatataggatatacatacacaattaggtgataaaccatatttggggatcatatactgcataaaaaaagtgatcccggagaccggaaccacttttctgagatttaagattttaccagcgcaatgacttcaatttccacgagagcgtctttcggcagtctcgccacttccacacaagaccttgccggcttatgtacatcaaagtattgtccgtacacttcattcacttccgcaaactgctccatatcagcaataaataccgttgctttgacaaccgtctcgagagaagcgcccgcttctttcagcacagcttttaaattgctgaacacctgatgcgtttgttctgtgatatcaccgtttaccatttctccttcagcagtaagaggaatctggcctgagctgtaaaacatgttgtttacgatgattccctgtgaatatggcccgatcgctgccggcgcgtgtttcgtatggattgctttagtcatttttctgtctccccattctttaaatgctgttctttaaaaaatcgcagaaaattgccgttttgaatctcaatcgttttgtctttcatattgatggttgaaagcgtgagcagtgacatgtattcatcgacaagccgttcattcactccctcggcttcaaccaagacgcctatccccgcgacgtttgcattaaactcatcaagcaggctgatcatgccgttaatggtgccgccggctttcataaagtcgtcaataatcaaaacgttcgaacccgtagccaaacttcttttcgcaagcgacattgtttgaatgcggttagacgatcctgatacataattgatgctcaccgtggagccttcagtcactttattgtcctttcgtacgatgacaaccggaacgttcagataactggccgctgcgtaagcaagagggattccttttgtcgcaacggtcatcaccacatcaatctcccgctccgcaaaaacggaagcaaaaagcctgcctacatgagagaggacagatggttttcctaagatatccgttaaatatacataaccgcccggaaggatacgctcaggatttactaaagactgtcccagctcctgtataaacgcttctgcttcagcctgtttcactttcggaatgtatttgacgcctccggcagctcccggcactgtaagcagcgtcccaatgccttgctgttcaaaggtctgtttaataatcgttaaatcttcactgattgatgactttgctgattgataccgttctgagaaaaacgttaacggtattaattcatgcggatgggttaacaaataatttgttaagtccaccaatctgccgctgcgacgaaacttcatgaacttaccccaaaatccgaataatttaaaaataatataacttaacatacggatttaatcaagagcattctgttcgccgatcatccgcaccgcgtacacttgatcacagaaacctcttaacccgttataaatccgctgcacctttgattcgtattgaaccaaaccgaatacagtcggtccgcttccgctcattaacaccgcatcagcgccgaagcgtttcatttgatttttaatcatcgccacctcgggatggaggctgagcgtaaccgactccaatacgtttcctaattgtccgcataccttttggaagcttttttcttcaatcgcgtcaatcatcgcctgcacatcaggatgccgaacctgctgtaagttcagccggcggtacacttcggcagtcgataccccgatcgtcggtttggcgagcatgacccagcaatgaggcggagcactgatgtgcctgatcttctcaccgcgtccggttgccagggcagtgcctccgtatacacagaaggacacgtctgaaccgatttcagctccaagctctgcaagctcttcgacagaaagctttaaatcccaaagcctgttcagccctctgagcgtagctgccgcatcgctgcttccgccggcaagccctgccgctacagggatcacctttgtaatcataatcgaaacgccttttttaacttgaaaccgttctttaagcagtttggctgcctgataagccagattcctttgatcatccggaacaaagcgattatgcgacgccactctgataacgttttcgggcagttctgtcagttcaatccgatctgccaaatcaattgtcgtcatgatcatctccacttcgtgataaccatccgggcgtttactcgtcacatcgagggacagattgattttggccggcgctttttctaaaatacgcatagctttcacctacttctccatctaaacataagtatgaacattgtatcacatttggagacccggaggtacttatccgaaattgacgccggttttgacagccgatagaaaaaaccggggaacggattgtcccccgggccactgcattatcggttattttggttctgagccgccatctgctgttcggcaatctcgatcgcgcgctttaccatattcccggcgtcacgcgcccgaatgcctccccagccctcgtttttcaccgtatcgtaaaaaccaaggtccttcgccagctcatatttgaactcatctgacataactccacgacgtctgcccaaacgaaacaaccccttttatagaattgatcaccattcgtgcacgccacgataaaacatgtgacacctatagcttccgtttaatcggctgaaactttcgagggaataattagaagagctttagaaggcaaaacaaaaagcagtaaacaaaaggttcactgcccattaaaatgctactgagcttgccgcatcgtcattgaatgtcaattcaacagtctcagtcagaatatcagcataactgtatgaaactctttcaaacgaattctcgtcttgatctagttgtatcacaaaaacagaagggtacgtctcagctaaaatgcccgaacgctcaatcgtttttcggcggccgccgtttgcttttaacgtaagccgtttacctaaattcccatcaagcgatctttttatatcggacaacgtcttcgccattgcatccacctcactacatttattgtacaacaagagcccaattttgtcaaataaaatttaaattatatcaacgttaataagtcattgtcaacaaaattattttgacaaaattctattgatttctgcgttatttttcacaagttccggaaatttatgtatcaatatgtaaaataattaacccgcatagcgaaatatatgcgggttttatcactcatccatttgatttatacggcataccgacacgcagcacacccttcgtttcaattcctcccagccctttctctctcgtcagcgtatttctcaggacatcccatacattgatccgctccataaacggagtgaagctgattttcgcgacaatatataccgggtcaagcgcatgaatattgacgcgtgacggcgaacttgcgaaattcgcgcccgctctgattaaagactcaaaatgagattggcacgcccccgcgaatatgaccagctgatccaaatgagggactttacgcctcgctctctgaacggtttcgacaaagtgtttggaatgcctgtaggcgcttaaatcgttcacgcctcccttatgcttggaatatgcatcatggccggtgatgactaaaatatccggcctgtatttatcaagcagctcgtcaattgacgccggcatttttttctcatggcaatgaattccgtataccggcacaccgattttttcataaaagttcaggcactttttcaaataggcctcatcgccgtccagatgcaatacctttccgggcatatgaaagtagtgctcctgatgctgatattgatttgtcgcgtaatactcctgtttttcccgaagcagcttataatcctggcggagcagctcgagagattcattcatcctgctttcatctcttttctttctcatggcctgttcgtcttttctgacaggctccaaatcagaaaaatcagcatccgcaatcaatctgacttcgtcaccatgcaggatggcaattgaatttccgttgcttgtttgctctataccgataatgcgaaataaaacatccatttgataggatttcctggctaccatatctcctatttgaaattgcacgttacccactccacaaatagactaagcctcatcatgaaagaagtcttggcaaatgcacctctttccgctgcggcgcttgatgtttcaagcttttcttgcagttgaatgaataaggttctcctctagcctatgtagcggcagtccaagtggtgacgcaaaacaaaaagccctcttagaaaagggctttatgcaatccgttggacaagagcgcgaattcttctatggacagggattcaccgcgtcgctttccatcaatattcgtttcttgaagaacttcttcaatttgagcttttttctcttttccgcccggaagattgttcacaaggttgttcagcaaggttttccggcgctgtgcgaagcttgctttaatcagctggaagaaaaacggttcattatcgacgtcaaccgccgggccgtcacgaagcaagagacggatgacggcggaatcgacattaggctgaggcacaaacaccgttttcggtacggtcatgacggttttggcctccgtatagaactgaaccgcaatggaaagcgatccgtactccttagaggaaggatcagcggccatccgctcagcgacctctttttgcagcattacgacaattccttttaacggaagatgttcttccaaaagcttcatgatgatcggcgtcgtcacataatatgggagattcgccgtcaccataatttcatcacaatcctgaaactgctcttcaatgacggatttgacgtctgctttcagcacatcttgatgaatgatcgttacattgtcatacggagacagcgtatcattgagaatgggcagcagacgctgatcaatttcaaacgcgacgacctttttcgcccgtttggcaagctgctctgtcaacgcgccgattccgggcccgatttcaatgactccggtccgatccgtaatttccgcatggtccacaattctgtccaatatatttgtatcaattaagaaattctgtcccagactctttttaaaagagaaaccgtactttttcagaatttccttcgttctgataggtgtcgcgatatctttattgttcatcctgttcctcctgcctcatagcatcgagcgcatcaataaaatcacttcttttgatttgaaacatttgcagccgtttttgaagctgcttgccgtttgtatagccgatcttcagcaggtcgcccaatcgttcgcgccgtcttttggcagccggtccgccgatcagaccggcctgtatgacatcttcagctgaaatttcactcggctttgcctccatctcttcatgcacattttccagacatgctctgatgctttcaatggatgcgtgctcaacgccaatgccgcgcttgtttttcggtttggcaagatgtttgggcagaaatgcgtgtttacagccgggtactgcttcagaaatggttttccggatcttctcccccggaaaatccgggtccgtcagcacgatgacccctctcgtttcctgcgccagccgaatctgcctgatgacttcgtctccgattgcggaaccgtttgtctcgatcgtatccgcatcaacggcaagttttatgcgcgcagtgtcatcgcgtccctcgactactataatttctttaattttcattacttcctccaaaaaaactttttatatccaaaacgaaacctttgcttgcatgtcacgtctaatatactgaaaatacactttacctattataacgaaaaaaacagagggcgcaaaaccctctgaatgaatcggaattaatttaagatttttattttgacctgtttctttccccagcggtaagctgaagatttttcagggaaaaagacatcaatccgtcttcctttaatggctgagcctgtatcagcggctacggcatccccgtatccgtctacgtggactcttgtgccgagcgggatgacgcttgggtctaccgcaatgactttggcattcggattgcttgtcaggttaacgcctgtagccgtttggccggaacagccgctgcagcttgcggtataagccgtggaagacacggtaatcactttaccggaagatccggtttcgcccgaagatgccttcacaggtgcactgagctgctcaatcttgggactgtgccgctttgtgccgaccgcaatgatctgatctttgcttttttcagatgtttcttctttgacaagctttcttgatacttcttttccattttctttgacaacatgaaaatgctttttaagtttgccttcttttcctttttgaacgatcttttctttcccgctgtcgagagacgcatcttctttttctttcacttgatacgctattttttcctcaactacatcggtgactttttcgatacgagtgatttgtatgccggcctgattttttgtgagcttttcgtgtaatgccggttttactttatcttcgtctttcatgtccatcttatgctgcgttaaaaagtcagcgaccgtagtcgaagtcgtccatattttctttttctttcccgcatcatttacagtgacctgaaaagccgggtcgaccgtgactttcatgccgtttgtcactttcgtatctgctgctggatctattttatcgtgctgattcacaggtgtatgctgttcgttcagaaatgcgccgactgtttttgccgttgaccataaagtcttttcttctccgcctcttgtcacacggatctgctttgcagcatcatacacgacattcatgttgtctgccaatgctgtctgcttagacggggtaatccggtcttcatttctcgtctctatatgtaaatcttccagaagttccccaaccgtttttgcatgagtgcgtatttgctttttcttgccgttgatggaaacagaaactgattgttttgagagctcatgtgccccgtatgcagtcccggttccgcccagcagaataatagctgcaatcagaataaccttgcttttaccaagctttacggaaaacagttttttcattttttgtgtgatgaaaaacgcctccttctcctcggagagattatatagagtatctaaaatgctgtcaaccctcccatctcgaagatgaaaaaccttcagcgtatccctcattatgcaaaaacaaagcaaaaaaaggaagagagacatatcgacaacctatcttatgaggagaaggaagcttgtagaaccgttttacatatccactgaatcggacaagcttttacacgttatgacagcgcattctgtcagttcatgcggaaaagtctttttgcgttttcggttgtaattgaggcaatttcttcatatgtcagcccttttaattcagcgagctgttcagcaacatattttacgtagcttggctcatttcgtttgccgcggaaaggatgcggtgtcaggaaaggacagtccgtttcaatcagcaaacggtcattcggaatttcctttgctacttcttttggtttcttcgcatttttgaaggtaaccggtccgccgaatgaaatatagaaattcatatccatacactgccgtgcaacctccgtgctccccgtaaagcagtgcataatgccgccgacttcttccgctccctcttctttcaaaattgtgacaacatcttccgttgcatcacgattatgaatgataattggaaggttcacttctttggcgagagcgatttgtttccggaatacttctttctgaatgtcttttggtgatttatcccagtggtaatcaaggcccatctctccgatcgccacgactttttcgtgagaggacagttccttaatccatgataaatcttcctctgtcatgtcaattgcgtctaccggatgccagccgatcgcagcgtatataaagtcatattcctcaatcagctccatcgcacgcgtgatagtgggtttgtcgaatccgacaacgacaattcgttcaactttttcagcctttgcacgcgcaatgacttcctctaagtctgtgtcaaattgctcggcatttaagtgcgcatgtgtatcaaaaagcatcataaaaactcctttcttgttgaaaaacaaaaggtgttcgacggaatgttacacgtgaaacaccttttgcccctattatttaattcgagtgcctttcggtaatgactggtcgacagctacaactttgagaacgccgtccgattctcccgccagtatcattccttgagaaagctcgcctctcagttttaccggttttaaattcgttacacagatgatcttcattcccacaagctgatccggtgtgtaatgcttcgcgatacctgatacaacttggcgctgttcaaagcccagatcaatttgcaatttcagcagccgatctgcttttttcaccggttccgcggacaagacttctgcgacgcgaagttctgtatccataaattgatcaaacgtaatttcaggaagacgctctgcttcttgcggctcttccgccttttcttctttagcaggagcagttccttgcattttttgcttgatgtaagctacttcttcttcagcttcaagacgagggaaaagcggttccccttttttcactttcacattcttcaattggccgaatgtctgaatgctgtcccaagctttaagagactgatcctcaactccgagctgggaaaacattttttcaggcgtctgcgtcaagaaaggctgtagcaatacggccgaaatacgcaatgattcagctaaatgatacatgacagaacgtaattctttttctttttcctgatctttagcaagcacccacggagcagtttcatcaatatatttgttcgtacggctgattaattgccatagcgttgataaagctactgaaaactccatgttttccattgccttttcataagctttaaccgtttcaccggctacggaagaaagctctgaatcaaaatcggtcacatttccttcatatgaaccaatctcgccgtcaaaatatttttggatcattgcgactgtacgattcagaaggtttcctaagtcgttcgccaagtcataattaatccgttctacgaaaccttccggcgtaaagacaccgtctgaaccgaacggtacttcgcgaagcaggtaatagcgaagttcatccaagccgtagcgttcaattaacgttaccggatcaacgacatttccttttgatttcgacatttttccgtctttcatcaataaccagccatgcgcgaatacttgcttaggcagcgggagatcaagcgccatcagcataatcggccagtaaatggtatgaaaacggacaatttctttaccgacaaggtggacgtcagccggccagtactttttgtaaagctcatcattttccgtatcgtaaccgagcgctgtaatatagttgaacagtgcgtcaatccatacatacacgacatgcttcggatttcccggcacttttacgccccagtcgaacgtcgttctggaaacggccaaatcttcaagccccggtttaatgaagttgttaatcatttcatttttgcgtgattcaggctggatgaaagaaggattttcctcataaaacttcagcaggcggtctgcatatttgctcatgcggaagaagtatgactcctctttgattaattcgaccgggtggccgctgtcagggctttttccgccgacaacctcacccttctcatttcgttccacatccaccagctgtgtttccgtatagaatgtttcatcagggatgctgtaccagccctcatactcatccaggtaaatgtcaccattatcaagaagtttttgaaacactttctcgataatttctttgtgccggctttccgtcgtccggatgaaatcatcgtgagaaatgtcgagctgcttccatagcttttggatttcagcaactgcgcgatccacataagcttgaggcgtgatattctcttcctccgctttctgctggattttctgtccgtgctcatccgttccggttaagtagcgtacgtcaaatccttttaatcttttgtaacgcgccatcgcatcgcctgccacggtagtataagcatggccgatatgtaattttccgctcggataatatatcggggtcgtaatataaaaagtattattgtcttgcggcatgttgcaacctcccattcagaatgtcgaaaagctcacgcccaaaggacgagagcggttttatttgatatacaatattgatatttgtcctctatctatgataccatcttagcctttaagatcaaggatatatacgtactgcgcgtaaaagagtaaataaaattaaaaatttttattgaaattaaaaaaagtcttaacatgtcgaaatttgtcgtatataatctactaatataaaacatcttggttcgaaagtcttgatttaaaaggattttcagtaggataataggttcgaaaaagcagtcaaaaagcctgttatttcaggatttccaaggctttacttactataagaactaattcttacaaacaatagcaaacaaaaagattgacgattattggaaaccttgttatgctaggaatgtaaggaattttgtcgaataatgacgaagaaaaatataaactacaaataattatctctcgggaggagactgttaatgaaatctactggtatcgtacgtaaagttgatgaacttggacgcgtcgttatccctatcgaacttcgccgtacactgggcatcgcagaaaaagacgctcttgaaatttatgttgatgatgaaaaaatcatccttaaaaaatataaaccaaacatgacttgccaagtaactggtgaagtttctgatgataaccttaaacttgccggcggcaaattggtactcagcaaagaaggcgctgagcaaatcatctctgaaattcaaaaccagcttcaaaaccaaaaataagctatttcatacaaaaaccgttcttgttatgacacaagaacggttttttttatgattgaatgtgataagcgtcataaatctcgcgtttcggtacgtcccgatctaccgctgtttgttttatggcctgtttggaagaagatccttcatttatgtaatgctccacatgttctttctcagaaagctccgcccaccaaggcttttcctcttcatccggttcagcgccttgattgccttcgacaacgagacaaaactcaccgcggatttgatcttcatttgcccattcaagcacctcggcgatggttcctctgatgaattcctcatactttttcgttaattccctcgtgacggcgatggttcgattacccaaaacgtcatgcattgctgttaatgtttcttttaatctgtgcggcgcttcgtaaaatatcatcgtttcctgccgttttttcaggatttcgagttctttcttcttttcttttttttgtctgtttaagaatccgtagaagaaaaacggctgcggggtgatccctgatgcagtcagcgcggttaatgccgcatttgcacccggaagcggaacgacatatccgccgatttgggtgaaatctctcacaatctcagcccccgggtcggaaattgtcggcataccggcatcactgaccaatgccacattctttccgcttttcagccattcaatgattttatggccgctgctttctttattatgttcatgatagctgatgagagatgtttctatgtcataaacatggcacagctttttcgtctgtctcgtatcttcggcagctatgacatcggccgatttcagcgtctctactgcacgaaaggtcatgtcctccaaattgccgatcggtgtaggaacaaggtacagagttcccatttcagattttccgttaaaactcatctgacgtcttaacatatacagcctccttgctgcgtcgtttttcttctatatattgctcttttttctttcgggtcagctgcttaaaacggtattccgcctgcatcgcttcccgttttgtttcaaatgattccgcatggcataacgaaaccggccttctcgcccttgtatatttcgcgccctttccctcattgtgggttttcagccgtttttgcagatcatttgtataaccggcatacagactgttgtcattgcacagcagcacataaaagaaatgactatttgtctccatataaaatcgtgcggatctctttcgtatattcattttgttcattatatacaaagagcgggggaagaattttgagatcagggcggccgcctttaattccttcaaccaaaatggtattcgcttctttaccttgtttcggataaataaactgaacccgtttcggttctattcggtatgctttcattagttcaaagatttccagaagcctccccggccgatgaacgagagccgcttttcctccttgcttcagcagtttgctgctgacggaaatcacatcttcaagcgtgcaaaggatttcgtgccttgcgattctgagatgctcgttcaggttctgctccgcctctttcggtgttttaaaataaggcggattgcaggtgacaacatcatatttattatgtccgagtctttccggcatatttttcagatcatcatgaatgagactgatctgaccgcccagcccgttgtattccacgcttcgaagcgccatatcatacaagcgttcctgaatttcaactccggtgatatcggcttttgaccttgtgctgagcaaaagcggcacaatgccgttccccgtgcataaatcaacaatgttccccttttgaatcggaacgtatgcaaacttagacagcagcacggcatctaatgaaaaagcgaaaaccgtcggactctgtactattttcatatcctctgctaataagtaatccaatctttcatcatcacgtaatgaaaccataatcttattcctttcggcactctttgaaaaaggcttccgacatcagcggaagccttttccttattttttatttaagaaggacagacaaaaaaggcaatctcccttgcggacgctcccataatggacgttgcaaatatgaaagccttcttgatacagccgggccagattgtcgtacccttctcctatatcactctgctctgccttctgtgtttttgtttctttctgatcggctttgaacttctcaatttgctccgtcgtgtcatcaagccgcttacgcaaatgcttattttcaagctgaagatggtgattctcttcaatcatttcgccgatatgctgctttaagtcacccagctgacggtacagcgaaccgatttgttcctccaggtttatgacagtatcaaataactcttttttatccaaggttccacacctcgttaatctgtggtttgtgcggatacgacgccctcttccaagagctcttcccaagtatattctatcactttttcacgattcttcagttccacctgaagcacccgttccagaatattaagaccgacaacctttgcggggccgtttgccgtcgtaatcatttcgcctaaatccggcagctgttcttttgccgtctcatactcatcattttcatacttcaaacagcacatcaaacggccgcacagaccggaaatcttcgttgggttcaacgataaattttgatccttcgccattttgatggacaccggttcaaaatcaccgaggaacgtggagcagcaaagcattctcccgcatggtccgataccgccgagcattttcgcctcgtcccttaccccgatttgacgcaattcgattctcgttttaaagatagaagccaagtctttgaccaattccctgaaatcaacccgtccgtctgccgtaaagtaaaaaatgactttattgcggtcaaacgtaaattcaacatcaaccagcttcatatctaagccgtggtcagccacttttttctgacagacttcaaaagcggacagggcctcctgtttgttttcttctacaatgagaagatcgcgttcatcagcaacgcgaataacctttcgaagcggaagcacaacatcatgctcgtccacttgtttatttgcgatgacaacctgcccgtattctacacctcttacggtttcaacaatgacgcagctgtcttgttctatatcaaatccattcggatcaaaataataaattttccccgcttttttaaagcggacgcctattacgttgtacaagcttatccctcctgcaacgttaacaccaagtgctccattaatccctgcacattcacattggaatgaagccgtttttttgcttctaaaacagcgagaatttggttcgtaacgctttgttgtgtaaattgcagcgcatgctgttttattgattggaataagtcttgataaatcagtttatcttcatttccaatttggatggataatacatcacggtatatcaataagagcatatcaagacccatttcttgatgggttttttctttgaaaaagggcacccactgatcctgaatgaagaaaaaggcatgtcctttccgctgatgtaagacttcatacaattttatcactttcgctctggactctgcaaactcatcatttcgacttaattcgactgcttccgcaatattatttgtcatatttgctaagagccgggccatgtgagggctcacttcctgttcaatcagtctttcttctatggctttcggctgaagcggctggaacgggagaacctgacatctcgaaacgatggtatccagtattcggtggagctgctcagtaatcagaattgcgatggtgtcttgactcggctcctctaaaaacttcagcagactgtttgccgcatttgtggtcatttgatccgcatgggatataatgtacagctttttatgcgattccagccccgttttggaaaactcttcctgaagcgattggatctgagcctttttaatggataatccgtcgggctgaaccacatgcaggtcgggatggtttccggattcgatacgcttacagttccggcactctccgcaaggctcagtcccgtcttcaaggcaaaaaaagctttttgcgagaagcagtgcggcatccaatttgcccgtaccttttttgccttcaaacagatatgcgtgagaaagccttttcttttcaatgctgttatgcaaaagccgcatcactctgggctgctgcccggtcatttccttccatgatattgccattgtatcactctctatgtgtaaaggttaatcaataaaccttttatttctccgattcgatccagcaaatcaattgccggtttttcctgatctaacatttcttccgtcagctgaagcagtttttcatctatttctttcacaagccccagggtccggctgctgccgtacaagtcaaagcttttctccgtctcatgcgataatccgctgtctacggcctcttttacaaaacgttttaccaatcctttgaacttcgctaagtctttgaagtttctcgacttcgtcagccttttcccgaacgtttctatatccgttaagaacctgctcagctgatcaaatttcagcttgctgctttggctgtccattgaacttttaaacgttccggaaagctctgccgctttataagcaggctgctgctttttctcaataaatgtacgtaagtcagaatttattttcacgtcgtcaaatccttaaaattgatgaaattcatcgaccgggaggacaaagaccgtcgctccgccgacttccacttcgacgggatatggaacgtaggaatccgcattcccgcccatcggggataccggggcaatcatctgatcacgtttacagccattctctttaatgaggctgagcgctttatcgacacggatatcttccaccccgatcataaacgtcgtattgcctgatttaaggaatccgcctgttgtcgcaagcttcgtcaccctgaagttgtggtcggttaatactttcaaaagcctgttgctgtcctgatcctgcaccactgccactattaatttcattctctaggccccctttaggttggaaagaacattgtcgttacattcattatagcaacttatgagaaacaggtcacaactgaatttttttcaatgcttcatttatcacttgaagtgcgtcctgaatgacgagttccttctttttcgatgcgtcgattgtatggaatctttccggaaaacgctgcataaccttttggtatccttcccgtactttcgtgtgaaagtgcagagcctcaagatcgagacgattcttttctcttgaatcattcgacgtaatccgtttcaacccttcttcaggctcaatagaaaaatagatggtgacatcaggcatcgtatcgccgattgcaaactggttaatagaaagaacttcatcaatgccgagccctctcgcatagccttgataagccagcgaactgtcgatgaaacgatcacacagcacaatgcgcccttctttcaatgcaggctgcaccttttcggttaaatgctgtcttctcgccgcggcgtaaagcagcgcctccgtttttgcatccatcagtgtattgtttttatttaagatcacttctctgatctgttccgcaatgtcgatgccgcccggttctcttgtcgctgtcaccgggagcccctctgccgacagaatctctttcagttcctgaagcacagtcgttttccctgcaccttcaggaccttcaaatgttataaataaaccgctcatgatttctcctcttctatatagacaagtaattgttccccgtttaacaagccttgaatatgcgcgtccatgccgattaaacgggaaagcttctgtacgatctcttctgttatccgttcgccgtccatgatcagcggaattcccggcggataaggaataatgttccccgcatgcaagcgcccggccgccttatttatatctgcaggctcttttgtaaacttccgcatctcattttgcggatattcaagtgtcgaaatggacggaaatgtccaattcacggcatccggcaatttatcgggcggtgtattctccagtttctgctgtatgtttcttacggctgcctgttctatcatccgccggccgcctatcgacagtacgagcaatacttggtactcgtcagccagctcggcaacaatgccctcactctccaaaatgcgttgtaatgaatagccggaatgtccgagctttgaccgaagtattaattttaacgggtccgcccgcagcccatatccggaaggctcgattatttcaatagaagaaattgatgcgaaccttcgtttgattttctcaatgtgctccatatggacgggaagtgtccctttttcagcaatatcctgcacataagcacgcgccgtatctaaagatgccataatcgggtatgacgggctgctgctttgcaaactgcttacataataagttaatcgatctctgtcaattcgggtgctgtttaaatgaaagtaagatcccatcgtcatagccggaagcgttttgtgagccgattgaacaacggcgtccgcccccatagccaatgatgaaggcgggaaaggctgccctaacacaaagtgagctccatgagcctcatccaccagcacaggaacaccgtatgaatgggcttttttaactgccgcagtcaaatcggcggcgtgtccgtaataagtcggattggtcaaaacaagtcctttcgcgttcggatatgacgccagcgctttttcgatgactgaaagagatacatgtgccggcacatgcatattttcatcgatttccggcgccaaataaaccggcttggctccggccaatgccaccgcatggaaaacagacttgtgacaattacgctggatcagaatgggttcacccggttcacaaacagctaaaatcatcgccagattgccggcggtcgttccgttgacgagaaagaagctttcctgagagccgtacaatctgctcaccaaatcctgcgcttccttaatgacccctgtcgggtgatgcaagtcatcaagacccgtgatctcagtcatatcaatagataaaagagattgatatacagatttcgcttcatcaaaaaagacatctccattgtgatgtcccggaacatgaaaagaatacgtatttcggtgcgcatgcttcatcagcgctgtatataaaggtgtgtccatttttaaacaaatcctttgcctgtctttcttattatatcgtgcctgcgagccaacttaaagctaagactttttgccatctagccgttatcccggccggaactcatatcaagcagcttcttttttaaatcgccttccatgataacaagctcctcctcggcacgcctgcgtttcatcctgccttcttcttgaatagacatgatttcttcaagtgtgctgactaagctttcctgcacttttttgagggtgtctgcctcaacaagtccgcgctcattggctttggccgtctcgactgtgcttgttttcagaagttcggcgtttttcagcagcaattgatttgtcgtatccgccgccttcttctgcacatctgccgcactccgctgcctcataagcgtcagcgcgatggcgacttgattcttccataaaggaatagccgtaacaatggaggactgaattttctctgccagtgcctgattcgtgttttgaatcagacggatttgcggcgcactctgaagcgtaatctgcctgctcagcagcagatcatgcaccctcttatccagacggtcggcaaactggcgaagatcattcacttcctgtgcggccatttgattgtgttttcgtaattcggcttttcttgccacttcgggaataagctttgttttcagctcatctaattttaattcacccgctgctatatacatagttaaatcagaaaagtattgtttattttggacgtacagctgatctaaccatttattgtcactcaacagcacatttttagaatgttccagccttctgctgatacggtcaatctgcacacttgtcttttgatatttcgaaagcacttcctgcacagatccggatacccttttaaacagccgggcgaaaaaccctttgttctttacctgcagatcatcggggtttacctggtcaagcttcagcatcagatcagccaatatctgtcccatctctcctgcatcttttctttgcacgtgctctatcatcgtgtgggaaaattccagaagattcgcctgcgcctgtgaaccaaacagaacaatgctttgcatgtttccagggtccagtttttcagcgagctgaagtgccgcttctcttttttcttccggcagcgtatctgcaagctttagatgagtctggtcattttgggcgcccatactgtcgtcggaacggtctttggccatttccttcttcctttcttattttctcagtgaatgctttgccatatctaattcaaagtgcaggtcgtcgatgtcctccttcatcagttcatgaagatcttcttccagccttctggaaagctccgccagagtcatcctcgtctcactcaaggacattgataaatctttattttttcgcggctgtgatgagagcaaagcatacttttccgtcagttccacaacagaatcaagcgtttgataatagaaacgctctgcctgataaaaacgcttcggctcctgctttgtgagcagatatattcgtcgggttatccgcagtatctctgcattctgcttcagcatttgtatacttttagagcggaaaagcgccctgcgtaatcggatgattttaccctttgcttcctcgagattttccttgatataagcatattcttttcttgtcagccggtgtttttttaaaaagagacgcttcgcattccacaagccggacgcactgactgcggctccgccggccgccccgtataaaagcgaatacagaaaaggctggtgccctatcgtaaagaaggttatccccgctaatacaaaaactgtgctgccgcaaaatgtccatttcatatattgaataaacggtttcatacttgatcgactcctatttattcacttttatcagtattatctattacattccatgtctaaacaagttcctcttcttatcgtatcagttcttttataaaaagtgaaaaaactcctctgatttcaggcaaaaaaaagacccttttcagggttaagaatataacgtcggtgtatgaaggcttttcaatttacgaacgaaaaattcataattcggatcagaggtcggagtggaaactactttcttctcacactctaaacatataaatttcgtataaatatggattcccctgcttttcttggtttcacacacaatacatgtttcttcatggccggacgtttcattcattttgcccacctccgtatgaatagccttcccttaaactgttgattgtatacacaatttggatctttttgaagtttgcaattagtatatgggcgttcccgtatttcggtgtttgtttcgtttttattcaaaaacaaaaaaggcagctcatgatgagctgcctttaccgtaatgatagcttggcggcgtcctactctcacagggggaaacccccgactaccatcggcgctgaagagcttaacttccgtgttcggcatgggaacgggtgtgacctcttcgctatcgccaccaaaccattgagagtgttctctcaaaactagataacagtaagcatacattcaaattggttaagtcctcgatcgattagtatctgtcagctccatgtgtcgccacacttccacctcagacctatcaacctgatcatctttcagggatcttacttccttgcggaatgggaaatctcatcttgaggggggcttcatgcttagatgctttcagcacttatcccgtccgcacatagctacccagcgatgcccttggcagaacaactggtacaccagcggtgcgtccatcccggtcctctcgtactaaggacagctcctctcaaatttcctgcgcccgcgacggatagggaccgaactgtctcacgacgttctgaacccagctcgcgtaccgctttaatgggcgaacagcccaacccttgggaccgactacagccccaggatgcgatgagccgacatcgaggtgccaaacctccccgtcgatgtggactcttgggggagataagcctgttatccccggggtagcttttatccgttgagcgatggcccttccatgcggaaccaccggatcactaagcccgactttcgtccctgctcgacttgtaggtctcgcagtcaagctcccttgtgcctttacactctgcgaatgatttccaaccattctgagggaacctttgggcgcctccgttaccttttaggaggcgaccgccccagtcaaactgcccacctgacactgtctccccgcccgataagggcggcgggttagaaggtcaatacagccagggtagtatcccaccgatgcctccaccgaagctggcgctccggtttccaaggctcctacctatcctgtacaagctgtaccaacattcaatatcaggctgcagtaaagctccacggggtctttccgtcctgtcgcgggtaacctgcatcttcacaggtactataatttcaccgagtctctcgttgagacagtgcccagatcgttgcgcctttcgtgcgggtcggaacttacccgacaaggaatttcgctaccttaggaccgttatagttacggccgccgtttactggggcttcaattcgcaccttcgcttacgctaagcgctcctcttaaccttccagcaccgggcaggcgtcagcccctatacttcgccttacggcttcgcagagacctgtgtttttgctaaacagtcgcctgggcctattcactgcggctctctcgggcttgcaccctaacagagcaccccttctcccgaagttacggggtcattttgccgagttccttaacgagagttctctcgatcaccttaggattctctcctcgcctacctgtgtcggtttgcggtacgggcacctctcacctcgctagaggcttttcttggcagtgtggaatcaggaacttcgctactataattcgctcgccatcacagctcagccttcacgggaaacggatttgcctatttcccagcctaactgcttggacgcggatatccaataccgcgcttaccctatcctcctgcgtcccccattgctcaaatggtgaggaggtggtacaggaatatcaacctgttatccatcgcctacgcctttcggcctcggcttaggtcccgactaaccctgagcggacgagccttcctcaggaaaccttaggcattcggtggaggggattctcacccctctttcgctactcataccggcattctcacttctaagcgctccacaagtccttccggtcttgcttcacagcccttagaacgctctcctaccactgttcgaagaacagtccgcagcttcggtgatacgtttagccccggtacattttcggcgcagagtcactcgaccagtgagctattacgcactctttaaatggtggctgcttctaagccaacatcctggttgtctaagcaactccacatccttttccacttaacgtatactttgggaccttagctggcggtctgggctgtttccctttcgactacggatcttatcactcgcagtctgactcccaaggataagtcatcggcattcggagtttgactgaattcggtaacccggtagggcccctagtccaatcagtgctctacctccgagactcttaccttgaggctagccctaaagctatttcggagagaaccagctatctccaggttcgattggcatttcacccctacccacacctcatccccgcacttttcaacgtgcgtgggttcgggcctccattcagtgttacctgaacttcaccctggacatgggtagatcacctggtttcgggtctacgaccacgtactcaattcgccctattcagactcgctttcgctgcggctccgcatcttctgcttaaccttgcacgggatcgtaactcgccggttcattctacaaaaggcacgccatcacccgttaacgggctctgactacttgtaggcacacggtttcaggatctctttcactccccttccggggtgcttttcacctttccctcacggtactggttcactatcggtcactagggagtatttagccttgggagatggtcctcccggattccgacggaatttcacgtgttccgccgtactcaggatccactcaggagagaacgaagttttgactacagggctgttacctcctatggcgggcctttccagacctcttcatctacctcgttcctttgtaactccgtacagagtgtcctacaaccccaagaggcaagcctcttggtttgggctggtcccgtttcgctcgccgctactcagggaatcgcatttgctttctcttcctccgggtacttagatgtttcagttccccgggtctgccttctcatatcctatgtattcagatatggataccactccattacgagtggtgggtttccccattcggaaatctccggatcaaagcttgcttacagctccccgaagcatatcggtgttcgtcccgtccttcatcggctcctagtgccaaggcatccaccgtgcgccctttctaacttaaccgttaaaaagaatcactacgtgatatcttgcattactaattgaatgtgaattacttctgttatctagttttcaaagaacacgttggtggagcctagcgggatcgaaccgctgacctcctgcgtgcaaagcaggcgctctcccagctgagctaaggccccgtattgggtaaagatggtgggcctgagtggactcgaaccaccgacctcacgcttatcaggcgtgcgctctaaccagctgagctacaggcccatctaccatatgaaagaatcaaaattccttcaaaactaaacaagacagggaacgttctgtttataagacccaaggtcttatattccgttaaaatccttagaaaggaggtgatccagccgcaccttccgatacggctaccttgttacgacttcaccccaatcatctgtcccaccttcggcggctggctccataaaggttacctcaccgacttcgggtgttacaaactctcgtggtgtgacgggcggtgtgtacaaggcccgggaacgtattcaccgcggcatgctgatccgcgattactagcgattccagcttcacgcagtcgagttgcagactgcgatccgaactgagaacagatttgtgggattggcttaacctcgcggtttcgctgccctttgttctgtccattgtagcacgtgtgtagcccaggtcataaggggcatgatgatttgacgtcatccccaccttcctccggtttgtcaccggcagtcaccttagagtgcccaactgaatgctggcaactaagatcaagggttgcgctcgttgcgggacttaacccaacatctcacgacacgagctgacgacaaccatgcaccacctgtcactctgcccccgaaggggacgtcctatctctaggattgtcagaggatgtcaagacctggtaaggttcttcgcgttgcttcgaattaaaccacatgctccaccgcttgtgcgggcccccgtcaattcctttgagtttcagtcttgcgaccgtactccccaggcggagtgcttaatgcgttagctgcagcactaaggggcggaaaccccctaacacttagcactcatcgtttacggcgtggactaccagggtatctaatcctgttcgctccccacgctttcgctcctcagcgtcagttacagaccagagagtcgccttcgccactggtgttcctccacatctctacgcatttcaccgctacacgtggaattccactctcctcttctgcactcaagttccccagtttccaatgaccctccccggttgagccgggggctttcacatcagacttaagaaaccgcctgcgagccctttacgcccaataattccggacaacgcttgccacctacgtattaccgcggctgctggcacgtagttagccgtggctttctggttaggtaccgtcaaggtgccgccctatttgaacggcacttgttcttccctaacaacagagctttacgatccgaaaaccttcatcactcacgcggcgttgctccgtcagactttcgtccattgcggaagattccctactgctgcctcccgtaggagtctgggccgtgtctcagtcccagtgtggccgatcaccctctcaggtcggctacgcatcgtcgccttggtgagccgttacctcaccaactagctaatgcgccgcgggtccatctgtaagtggtagccgaagccaccttttatgtctgaaccatgcggttcagacaaccatccggtattagccccggtttcccggagttatcccagccttacaggcaggttacccacgtgttactcacccgtccgccgctaacatcagggagcaagctcccatctgtccgctcgacttgcatgtattaggcacgccgccagcgttcgtcctgagccaggatcaaactctccgataaagtgtttgactgactacgcacatcgctgtgcgatttatttaaaactttgaattaacaggtacgttttgtcttgtttagttttcaaagaactttgtccatcgctcttgaagcgacttaattattataacatctcagtgtcattgtcgtcaataactttttaaaatttctttttcaagaattcgtttcgtcatcagcgacgtatattagaataccacccttgatccaacatgtcaacaataatcgacaaattaaatgatgaagcgtttaatgactatcaaagccgcgataccgggaatcccaagaattccgctgatgcccgttgtaatcaggttaacagggatatgaatacccagactgccccgaacaagttcacacccaccaacagaatcgcgccggcaataaacttaatggcagtcacaccaatccaccttaacggttttgaagatactccccataaaaaaagcaaagcaaccagaccgacaatcaaaccgataatgaaaaaaggctccatgaatcttccccctcgcttgtttagtacaagcttatgagaagattccggagaatagacctcttacttccatctgctcattttcaaattccgctgcttcgcttctttcaaataaaaaaagtacttagattcagcgactttcagctcaaacaacacctcagcggagggctctagacttttctcgaccagactcttctgtctgttccattcttctttttgtttaaagagctgttctatcagcttctcgtcaaactcttttcttaatgtatttctgcgaagaaaacccatgccttgccttttcctcccttacaattcacgtcttccttcaagagcttttgaaagagtgacctcatcagcatattccaaatcaccgccgacgggcagaccgtgggcaatacgggagagcttgatgcctgagggctttaacagccttgatatatacatcgctgttgcttccccttcaatattagggttggttgcgagaataacttctgtcacttgatcatcctgaagacgtttcagcagctccggaatcttaatatcctccggaccgatgccgtccattggtgaaatcgcgccgtgaagaacatgatactggccgttatattccttcattttctccatcgcgatcacatccttagggtcctgcacgacacaaataacagacttatctcttcttgtgtcctcacatatataacaagggtcctgatctgtaatatgtccgcaaatcgagcaatatgtcagattccgcttcgcattgacaagcgccttagcaaaatccaatactgtgtcttctttcatacctagaacaaaaaaagccagacgaaccgctgttttcggtccgatccctggcaatttcataaagctgtcaatcagctttgatattggttcaggatactgcatgtttatttatccccctagaataaacccggtatgttcattccttttgtaaattgtcccattgtctcattcgtcatgtcatccacttttttgagggcgtcgtttgtcgcagcaagaaccaggtcctgaagcatttcgatatcttccggatcaacaacttcttctttaatggcaacgtctacaacttctttttggccgttgacttttacagtcaccataccgccgcccgcagtgccttcaagcactttttcagcaagttcctcctgagccttcgccatatccttttgcattttttgcatttgtttcatcattttttgcatgtttcccattccgccacgcatattcaatcactctctttcatcttattagtcttttatttcgattaaatccgctccgacaagttttttcgcctctgcaatcagcggatcttcttcagccggttcgtttgatccttcactttcctgctggtgatcatttaaaaattcttctcttattttaccccattgtgcttccggaacgccaatcaaatccattcttttcccgagcattgattcgagaatctgttcaagattcgtacggactccgttattgtcttctgcaaccattttacaatggatttcgtatttaaatttaagcacaaatgccttttgagcagcggccaccggttcactgtcattcaaaagagccgcatgagacaccttattctgctgtttcaggtgtgccagcagcttgccccagctgcttttaagctgttcaagatcaggtcttgtggcttccttcaatatctcatgaattcttccgaccggggctttataatggctttttccgcctttttgaggacgcggagcttctttcggagcgctttccatctgaaccttcacaccggaggttttcagcctttctacttcctgctcaagctgctggatcttattcatcagcatgccgacctcagggatgtctccggcggattgctgtgccgtttggcatattttcacgacagccacttcaaaaaagattcttgggtggttcgtccacttcatttcctgatggcttttattcaggatatcaatcatctcatataaagcggggccggtatgtcaccgctcagattccgaaacgtttcatcgaccttcaccttctccaggactccttctaaaccgggagcggcctggtacaagagcatatccctgaaatagaaaatcatatcttcaatcagtttggccgcatctttcccctgctggagcaattcattcagtgtttccaatgcctcggaaacctgtttgcggtgaagagcagatgccagttttccaatatagtgctgagaaacggctccggtaatgagcaaagcgtcatccaccgacagctcctcgccgctgaatgatacagcttgatcgagcaggctcagcgcgtccctcattcctccgtccgcagcactcgctatgatatcaagggctccttcttccaccttcagctgctctgcatcgacgattgtcttcattcgtccgacaattgctttggatgtaatccgtttgaagtcaaaacgctgacatctggagataatggttaaaggaatcttatgaggctcagtcgtagctaatatgaaaatgcaatgtgccggcggttcttccagcgttttcagaagcgcattgaatgcgccgatagagagcatatgcacctcatctataatatataccttgtaagtaacggccgacggggcaaattttactttgtcacggatgtcgcggatttcgtctacgccgttattcgacgccgcatctatttcaatcacatctgatatagagccatttgtgatccccttgcatgccgcgcactcattgcacggttcttctacaggggcgtgctcacagttgactgctttcgcaaatattttagctgcactggtttttcccgttccccgcggtccagaaaacagatatgcatgagaaaatttcttttgcaaaagggcattttgcagcgttttcgtaatgtgttcctgtccgaccacatcttcaaactgctgaggcctaaatactcgatataaagcttggtaacccacaggatgcgccctcctctgttattcatcatgtttattatacatgaacgtgcttttaacgccaaaacccgtttttcatatacgaaaaaactcacctgccataacaggtgagtctgaaatttgatgattgatttaccgtgcaccttctgtcgattcgctaccctaagcgttacttaagcagttagctcagcccaggcaaccctgcggcacatgagaggtttcacttaatgctgcttccttccggacctgacatggttcatgaattcccattgcgcaggacccagacgtcaacgccacttacttaaggcagaccttacagtaaacgaacctcgagaagggattcggccccgctagagcggattgcgggtacagggcaccgctacctccccgcttagcacggcaaaataaatatcaaattttgatatgcgcaccattcatgatgcacacataagtatatctgcttcaggcagaaaatgcaaccgtactactcagacaactttttcctcatgtctttcttttgccggcgcagctttctgaaaaaagcgctgagcatttctccgcactcttctccgagcacgccgctcaccacttccgcttggtggttgaaccgctcttcctgcaagaggttcatcagcgttcctgtacagcccccttgggatcaaatgcgccgaatacgaccttatcgactctcgaaagcacgacggctcccgcgcacatcggacacggctccaaagtgacatagagaacggcatcctcaagtctccatgtccccagcttacggcacgcttcgtctatcgccagcatttcggcgtgggcaagcgacctctgttcagtctcccgcagattatgcgcccgcgccacgatctcatcgtgcagaacaagaactgctccgatcggcacttcacctttctcttcggctttcttcgcttcttttatggcttctctcatataatattcatcattcatcggttcgagctctcttcttaagttttttcatgtctcataaaggttaaaataggaataccccagcagaaaggagttgccggtattgtctgaacctaacaacacagcccttctgattgtcgatatgatcaacaattttcaatttgatatgggcgaacgtcttgctgaaaaaaccaaacaaattgtcccccgtattttatcattaaagaagcatgcaaaacaaagcaactggccgattatttatattaatgatcattacgggctctggaaggctgatattgatgccatcagggaggaatgcagcaacgacagaagcgcctccattataaaagatatttcgcctcagccggatgattattttctcattaaaccgaagcattccgctttttacgaaacggcgcttcacacccttctgaccgaattacaagtgaaccgattaatcatcacggggattgccgggaacatttgtgtgctgttcacggccaacgacgcttatatgagagaatacagcattgccattccgaaagactgcaccgcttccaataacgacgaagacaatgatttcgctttgaccatgatggagaatgttctcttcgcagaaataaccacggaaaaacaaattaccggcgaaaaataaacatgatcagcctccttttttcatatatttgatagcggatatgaaaggaggcgtttttcattcagatctatatagtgaaacggggcgacacgctttccgctattgcggcgcgctaccggacagccgcaaatgtcattgcggaagcaaataaactgcctaatcccaatacattggttgtcggacaaacccttgtcatcccgattgagggtcaatattacgaagtaaaacaaggtgatactctcgcgtcaatcgccggccgttttcatatatcggccgcggagcttgcgagggtgaacggaattcagcccggcaccacattgagagtcggaacccgcctttacattccgcagcaggcgaataagcccgatatcgaatcaaacgcatatatagaaccgcggggaacgagcgtaagcgctaatcttcagcaggcggcaagggaggcctctccttatttaacatacctcggcgcattcagttttcaagtgcagcggaacgggactttaaaggaaccgcctctgaccaatttaaaaagcatcagtgacaggcacaacaccacactgatgatgatcatcaccaaccttgaaaatgacgcattcagcgatgaactcgggcggctcatcttgaacgacaatacagtgaaaacaaaactctttcaggaaatcgtctccacggctaaaaagtacggctttcgcgatattcactttgatttcgaatatttacgtccacaggacagggaagcctacaatcgttttttacgtgaagcgagaacgatttttcatcgggaaggctggaagatttcaacggcgcttgctccgaaaacgagcgcgactcaggccggcaaatggtacgaagctcatgactatagggcacatggagaaatcgtcgatttcgtcgtgattatgacatatgagtgggggtacagcggaggcccggctgaggccgtatcacctatcggccctgtaagaaatgtcattgagtacgcgctgacggaaatgccttcttcaaaaatcgtcatgggccagaatatgtacggctatgattggacactgcctttcaaacagggaacgacagcgaaagccgtcagtcctcagcaggcaatcgctctggcagcacgctataaagtcgacattcaatatgacgaaaccgcccaggctcccttcttccgatacacggatgcaaatcagagacggcatgaagtatggtttgaagacgcacgatccattcaagcgaaattcaatttaattaaagaacttcatttaagaggaatcagctattggaaactcggcctttctttcccgcaaaactggcttttgctcggcgatcaatttcatattgtaaaagagacgtttcgttaattgggagcgtcttttttcatgggcttttctgtgagtgtgatacaatataaaggccggcagctgacggatgtttgcagaattaaggaggattttcaatgaacagagccccttttatcgcggtagaaggtcctatcggggcaggaaaaacgacactcgctacgatgctttctgaagagctcggttttcctatgattaatgagattgtggaagacaacccttatctcgataagttttatgacaatatcgaggagtggagtttccagcttgaaatgttttttctatgtcacaggtataaacagcttgaagacaccgatcgagattatttaaaacaaggacagcccgttttgtccgattatcatatttataaaaatgttattttcgcagagcgtacattgcacggccaaaagcttgagaagtataagcagatctatcatctgctcactcacgacctgccgaagccgaatatcattgtatacataaaggcaagcctgccgacattgcttcaacgcattgaaaaacgcgggcgcccgtttgagaaaaatatcgaacatcaatatctggaacatctcattgcagattacgacacagccatcagacagcttcaggaagaagatccggatatatctgtactgaccattgacggtgatactgaagactttgttttgaataagacagactatgaaagaattgcccgtcaggtaaaggagcttattaaatgaaagacattcatattccaaacaacgccattataacagtagcgggaacggtaggagtcggaaaatcgactttgaccaaagctttagcaaaacggctcgggtttcatacctcacttgaggaagtggatgaaaacccttatttagagaagttttatcacgattttgaacgctggagcttccatttgcaaatttattttctggctgagcggttcaaagagcaaaaaaacatgtttgaatcaggcggcggattcgtgcaggaccgttcgatttatgaagatacaggcatattcgcaaaaatgcatgccgataaaggaaccatgtcgctgacagattacacaacatacacaagcctatttgaggcgatggtcatgacgccgtatttcccgcatcctgatgttttgatctacttagaaggcgaccttgaatacattataagccggattgaaaagcggggccgcgagatggagctgcagacaaaccgctcttattgggaagagatgtatacacggtacgaagactggatcagcggttttaacgcctgccctgtactgaaagtacgcattgaagattatgaccttgaagctgatgaacagtcactggaacctttgatcgaaaaaatcagtcacgtgatcagcgaaaacagaaacaaataaaaatagcaaagcgattttccccgaacagagaaaatcgctttttttgcatataaaaaatccgctgcatcagatgcagcggacaaaacaatctccaatatatgctcgagtttcattaggtttaaaatcaatatggcggaggaagagggattcgaacccccgcgggctttgacacccctgtcggttttcaagaccgatcccttcagccagacttgggtattcctccgtatcgacatttaataatataccacatgacccaaatttcagtcaagcgctttttcatattttttatttcatttcttaaacagcttttccgtcagctttactatcatacaaaagtcttgcgtccaattcaacctcagtatgccatacgggcaggaaaacaaagtaaaaatcaagaatagattcaaacagataacctgctcataaaggtggagaacataatgaaaatcatcatcgcacccgattctttcaaagaaagcatgacatcaaaagaagccgctgacagcatagaaaaaggattcaaagcggtcttccctgacgcggaatataccaagatacccgcggccgacggcggagaaggaaccgttcaggctttgacggatgccactggcggaagcatcatcaaaaaaactgtgaccggtccgctgggaacgccggtaaacgccgcatatggacttctgggagacggacgcacggcagtcattgaaatggcggaagcatcgggactccatctcgttccccgccatctcagagatccgttgaacacaacgacaagaggaacgggtgaactgatagcggatgcagcctcccgcggggcgagtgagatcatcatcgggcttggcgggagtgcaaccaatgacggcggaacaggaatggcgagcgcgctcggtgtgcgtttcttaaatgaggaaggtcaggagatacatgacggaggaggcgctctgcacaccctagcttctattgatataagcgggctctcccctgatctgaaacatatccgttttcgtgccgcatgtgatgtcgaaaatcccctgaccggtgaaaacggcgcgtcatatgtcttcggcccgcaaaaaggggcgtccgagaagactaaagttgtattggatcgcaatttataccatttcgctgacgtattgagacgtcagcacgatatcgaagcggataccgtaaaaggcgcgggcgccgcaggggggctgggcgctggactgatcgctttcttacaggcagaaattcaaagcgggattgacgttgtattagatacactgtccttctcagatcagataagagatgctgaccttgtcattaccggagagggccagattgacggacaaacgatattcggcaaaacccccgccgggatcgccgcacgcgcagccgctcaagaaattcccgttatcgcattggcgggctccttaggcaaaaattttgagcatgtttacagcgcaggaataacagctgtattttctatcgtgcccggcgctgtaagtcttgaagacgccttagcatccggccgttttaacctggaaagtacagcccggaatgccgccgctctataccgggcagcaaaaaaggcgcgcctctagggcgcacctttttatggtttgatgacttctttatttcccatataaggacgaagcactttaggaatgatgacacttccgtcttcctgctggtagttttccaagatggcagctacagttctgccgactgcaagacctgaaccgtttaatgtatgcacatgctcaggcttgcctttcgcttcgcgtctgaaacgaatgttcgcacgtcttgcctggaaggcctcaaagttgctgcaagaagaaatttcacggtatgtgtcttggcttggaatccatacctcaatatcgtactttttcgcagctgtaaagccgagatcaccggtacacatgctcatgacgcgatacggcagttcaagcagctgaagcacccgctcagcttgatttgtcagtttttcaagctcctcataagaatcttccggcttcacgaactttacaagctcaaccttgttgaactgatgctgacggatcaaaccgcgtgtatcacggccggcggatcccgcttctgaacggaagcaggcgctgaacgcggcataattgatcggcaggttctcaccggataagatttcatcgcggtgcatatttgtaatcggcacttccgccgtcggaattaagaaataatcctcttctctgattttaaaagcatcctcttcaaatttaggaagctgtcccgtacctgtcatgctcgtacggtttaccatataaggaggaatgacttccgtgtaatcatattcatccacgtgaagatccagcataaagttgtagagcgcgcgttcgaggcgggcgcctaatcctttataaaacacaaaccggctgcctgttacttttgaagcgcgttcgaaatcaagaatgtttaagcggtctgcgatatcccaatgcggtttcggctcatatgaaaatgccggcgcctctccccacttgcgaatttcaatgttatcatcttccgtttctccgacgggaactgaatcgtgcgggatgttcggaatagacagaaggatggtttcgagcgtcgtttcgacagtacgaagctcttcatcaagcttcttaatttcttcgcctacttcacgcatctctttaataatatgatcagcgtcttttttctcccgtttcaaaacggcgacctgctgagacacctcattgcgttttcccttcagttcttctactttaccgataagctctcttctcttttcatccagctcttcaaacttgtcaaagtcagataagtcttcgccttttggaatgagcttcgcttttacctcttgaaaattggctctcagcaccttcgtatcaatcatgcctaacaactcctatctgtttttatcgaaaataaaaaagagccctcatcccctaaaagggacgagagctctcgcgttgccaccctgattgaaaacaagctcacacttgctttccgctttaacacataacggttttcccgtaaatgcctacttgttttcagcatttcgctcaaggacggattcggacagcatctttcaccgattcgcaccacccatcggctctctttgaaagaggggcttcctactgcttcctgtcaacgcttttcgatctttatttgtgattataatgtactataagtatcagcggttttcaactgttttatacagctgtttcctgcttatgcttttccgccatcttcacaaacagctctgtcacccggtgatcatccgtcagttcaggatggaacgagcagccgaggaaatttccctgctttgcagccacgatgcgtccgttatgctcacaaagcacttcaacatcttctccggcttttaaaatatgcggtgcgcgaataaatacacccgtaaacggctcatcaaggcctttaatcgtcagatcagcttcaaagctgtcgacctgacggccaaaggaattacgctcgacaactacgttcaacagccctaaatgagcgttatccgttcccgctatctctttggctaagataatcagaccggcgcatgtgccgaacatcggcttgccttgagcggcaaactcgcgaagcggctccataaaatgatacgtatccattaaacgccgcatcgtcgtgctttccccgcccggcaggattaagccgtcgatgtcattcagctgttcaggacgcttaatgacgacaccttttgaaccacatgcttcaattgaacgaatatgttctcttactgctccttgaagtccaagtacaccaattgttaacatgcttacagctctcctatggttttaccagccgcgttcttgcatacgctgttccggcaatagatttgagatttcgatgcctttcattgctgtgcctaattctttagaaagctcagcgatcagtttgtagtctgtataatgagtcgttgcttcaacaattgctttggcgaatttagcagggttgtctgatttgaaaatacctgaaccgacaaatacgccgtcagcgccaagctgcatcatcaatgccgcgtcagcaggcgtcgctactccgccggcagcaaagttcactacaggcagtttgccgtcacgtttgatctgaagaagcagttcataaggagcgccgaggtttttagcttcagtcatcagctcatcatcgctcatcgcaacaactttgcgcacttgcgcgtttacttttctcatatggcggacagcttccacaatgtttcctgttcccggttcgccttttgtacgaagcatggaagctccttcggcgatacggcgcgttgcttcgccgagatcacggcagccgcatacgaacgggactgtatattcatttttatttaaatgaaattcttcgtcagccggagtcagaacttcactttcatcgatgtaatctactcccattgcttcaaggacacgcgcttcaacgatatgtccgatacgcgcttttgccattacgggaatggatacagcattcattacttcttcaacgattgtcggatcagccatgcgggcaacaccgccggcagcgcgaatatcagccggaacgcgttctaacgccattacggcaacagctcccgcctcttccgcaatcttcgcttgttcagcatttactacgtccatgatgacgccgcctttttgcatttccgccatgccgcgttttacacgatcagtacctgtttgagccattatttggtccccctagtcaatgtatagttagataatgtctatctcttattgtatcccagaaatacaatatttcatatgggtattcttattttacagcgagatgaataagatagatatcatttttttactaataatttggttttttcagtatattaagcaaaagagccctaactttcatcagagctctttcttatttcttaaaaccagcctgttaccgtgtcaacggcgctgttccagataccggagaaaaatccgccgatgccgcgcatcatctgaacaaaccagtttgctttatctacatcatttttcgttacaagattcacgctgaactctttggatttgaggaagccatagtctttgtcactgcctttgtatgtaactgtcagcgttccgactttcgttccctttttcacaggagccgtgatttcttttttatctatagtcccttcggctttatagttcttttcatccccgcttttcacaggaatagaaagcgccttgtcagtaacaatatcgacttgcttgtctttccctttttcaacgtcaaccgttttgtgcccttttacttgagagccttcagggtaaagatctttcattgagaaattgctgttaaatgcgtaatcgagcatttttttcgtttcatcaaaacgtccggtatgcaggttgccttttgcgtttaatacaacggtgatgacccgcattccgttccgctgtgctgtgcttgtaaaacaagatcccgcagaatcagtagaacccgtttttaagccgtcaacgccagggtattcagaaacaagaccttttaacatgaagttccagttcggcatgtccatttcatcatcagtgccggctctgaatttcgttttagcgatgcttgttgttttgagaacttccggataatcagtgatcaggcggtctgcaagaagcgccatgtctttagcagaaacttcactctcttctttaacgccttctccttgcggctgtttgccgtgaagatcttcattcacaagccctgtggcatttttaaaatcatagtttgtcatgcctaattctttggctttcgcattcatttcagcgacaaatttcgtttcagttccggcaagaatttcggcaactgcaatcgcggctccgttagcagagtaaatcgccatggcctgatacagttctttaaccgtgtatttgccgtcttttcgaagggggacgtttgataaactgttgtcttgagaaatttcatagacataatcatcaggagtatacgtttgatcccatttcacttttccttctttaatggcttccagaagcagatattcagtcatcatttttgtcatgctggcaatcggcagtcttttgtctgcatttttactgtataaaatttttcccgatgaagcctcaatcattatcgcagctgatgcgttgacatcaatcgggtcattgccggctgcctccgctttagacatcggaacaaagcaagttgcggccagtgccagtaccactaatgacaccaacagctgtttccatttcgtgatgttcaatcttacgacctccgtcattcattttaaatctataattaagccgttaaggacatattcaaattcaaaacacaacagtataaattttatcacactcgatataaaaaaaatagacagagtcagcgaccctgtcaaatgttttttatttgtaacaattatgagattgtgtagtttggtgattctttcgtaatttggacatcatgcggatgactttcgcgaagaccggcacctgtcatacggatgaattgagcctcttctcttaaagcgcgcaagtcttttgaaccgcaatatcccatacctgaacgaagaccgccgacaagctgatacactgtttcttctacaggacctttgtacggagtccgtccttcgataccttcagggacgaatttcttattttcttcttggaaatatcggtctttactgcctttttccatggcagcaacagaacccataccgcgatacactttaaatcttctgccctgatagatttcagtctctcccgggctttctgaagtaccggcaagcaggcttccgagcattacggcatgtccgcctgaagccaacgctttcgtaatatctccggagaatttaataccgccgtctgcgataattgtcgcgccgtgttttctcgcttcagtggcacaatcataaatggcagtgatctgcggtacgcctacacctgcaacgacgcgtgtcgtacagatagaaccaggcccgattcccactttgacaatatttgctccggcttcaatcagagcttttgtcgcttcagccgttgcaacatttcctgcgataatgttcagttcaggatatgtttcacggattttcgcaactgtgttcagtacgcctctggaatgtccgtgagccgtatcaaccacgataacgtcgacattcgcttcaacaagcttgctgacgcgtgtcattgtatcgcctgtcacgcctaccgcagcgccgacaataaggcgtccgtgttcatctttagatgaattagggaattcgataaccttttcaatatctttgatcgtgataagaccttttaatttgttttggtcatccactaacggaagtttttcaattttatgtttctgtaagattttttctgcttcgtctaatgtggttcccacaggagccgtaaccagctcttcttttgtcatgacatcactgattttcattgaataatcagagataaagcgaagatcacggtttgtaatgataccgacaagcttttgatcgtctttattatctacgatcggaacaccggaaattctgtatttccccatcaaatgctccgcatcgaatacttgatgatcaggtgttaaaaagaagggatttgtaataacgccccgttcagaacgtttgactttgtcaacatgttcagcctgctgttcgatggacatgtttttatggataatgcccaagccgccctgtctggccatcgcaatcgccattgctgattctgttactgtatccattcccgcactgatgacaggaatattaagctttaacgtttttgtcagttcaacagataaatccacatcacgcggaagtacgtctgattgagccggtacgagcagtacatcatcgaacgttaagccttcttttgaaaatttactttcccacattagtaaatccccctcttttcggcaaaatattatatgtagattatcaactagaaaacagcatgtcaaggaagcgaaaaagagttgaaatatttagataaaggaaagggtttaaaaatacatatgagagatcatgagtggaaagagttatcattattttattccgtagaatcttcccagaaatttctaaacaaagtctatacagaaagcggcatggaagaaccaaaacgatatgcgtttaagaacagtgagcgcttcatattctttatcaaacacgccgagtccttttataagcaggcatctctttctcctttagaaattaagcctattctgttgttttacgggatgtcacaattgctgaaagcctgccttctgaccacagatccaagctacccaagccacgcttcagtactcgcgcatggcgtgactgcccggaaacgcaaaaagcaaaattactcctttagggatgatgaagtgaaggtgcagcgcaatggcttatgtattcatgtaatgaagcacttattcgggatagctggtcttgaggaagaacggtacacaatgaagaaattactgacagccatacctgaattgcatactgtcttttacttccaagagaaaaagaattggatgacccaagtagagctgaacgatgaccttatttcagtgcctgagcatgcggtgattcattacaatatgtctgattcccgctttgctgaatatatcagccatcatttgaagtggtcttttctgaggaaagaccataaccacttgttttttgaggctgacccgatagacagggaaccttggtcttctccaaatttattgtttcacttggagaaaaatcaatattacattccctctcagcgtgatcacttcctgcatcttccggaaatgattattcattatttggttctctacaatattgggatgattgcgagatatgaaacggagtggtggtatgaactgctgacacagcatgtcagtgatgattatgtgatgatccgacggttcttagaggtcacggaacgcaaatttccgtattacgtttctaaattcctgaagcaatacttgtaaacaaaaaaggcagctcatgatgagctgcctttaccgtaatgatagcttggcggcgtcctactctcacagggggaaacccccgactaccatcggcgctgaagagcttaacttccgtgttcggcatgggaacgggtgtgacctcttcgctatcgccaccaaaccattgagagtgttctctcaaaactagataacaataagtatacattcaaattggttaagtcctcgatcgattagtatctgtcagctccatgtgtcgccacacttccacctcagacctatcaacctgatcatctttcagggatcttacttccttgcggaatgggaaatctcatcttgagggggcttcatgcttagatgctttcagcacttatcccgtccgcacatagctacccagcgatgcccttggcagaacaactggtacaccagcggtgcgtccatcccggtcctctcgtactaaggacagctcctctcaaatttcctgcgcccgcgacggatagggaccgaactgtctcacgacgttctgaacccagctcgcgtaccgctttaatgggcgaacagcccaacccttgggaccgactacagccccaggatgcgatgagccgacatcgaggtgccaaacctccccgtcgatgtggactcttggggagataagcctgttatccccggggtagcttttatccgttgagcgatggcccttccatgcggaaccaccggatcactaagcccgactttcgtccctgctcgacttgtaggtctcgcagtcaagctcccttgtgcctttacactctgcgaatgatttccaaccattctgagggaacctttgggcgcctccgttaccttttaggaggcgaccgccccagtcaaactgcccacctgacactgtctccccgcccgataagggcggcgggttagaaggtcaatacagccagggtagtatcccaccgatgcctccaccgaagctggcgctccggtttccaaggctcctacctatcctgtacaagctgtaccaacattcaatatcaggctgcagtaaagctccacggggtctttccgtcctgtcgcgggtaacctgcatcttcacaggtactataatttcaccgagtctctcgttgagacagtgcccagatcgttgcgcctttcgtgcgggtcggaacttacccgacaaggaatttcgctaccttaggaccgttatagttacggccgccgtttactggggcttcaattcgcaccttcgcttacgctaagcgctcctcttaaccttccagcaccgggcaggcgtcagcccctatacttcgccttacggcttcgcagagacctgtgtttttgctaaacagtcgcctgggcctattcactgcggctctctcgggcttgcaccctaacagagcaccccttctcccgaagttacggggtcattttgccgagttccttaacgagagttctctcgatcaccttaggattctctcctcgcctacctgtgtcggtttgcggtacgggcacctctcacctcgctagaggcttttcttggcagtgtggaatcaggaacttcgctactataattcgctcgccatcacagctcagccttcacgggaaacggatttgcctatttcccagcctaactgcttggacgcggatatccaataccgcgcttaccctatcctcctgcgtccccccattgctcaaatggtgaggaggtggtacaggaatatcaacctgttatccatcgcctacgcctttcggcctcggcttaggtcccgactaaccctgagcggacgagccttcctcaggaaaccttaggcattcggtggaggggattctcacccctctttcgctactcataccggcattctcacttctaagcgctccacaagtccttccggtcttgcttcacagcccttagaacgctctcctaccactgttcgaagaacagtccgcagcttcggtgatacgtttagccccggtacattttcggcgcagagtcactcgaccagtgagctattacgcactctttaaatggtggctgcttctaagccaacatcctggttgtctaagcaactccacatccttttccacttaacgtatactttgggaccttagctggcggtctgggctgtttccctttcgactacggatcttatcactcgcagtctgactcccaaggataagtcatcggcattcggagtttgactgaattcggtaacccggtaggggcccctagtccaatcagtgctctacctccgagactcttaccttgaggctagccctaaagctatttcggagagaaccagctatctccaggttcgattggcatttcacccctacccacacctcatccccgcacttttcaacgtgcgtgggttcgggcctccattcagtgttacctgaacttcaccctggacatgggtagatcacctggtttcgggtctacgaccacgtactcaattcgccctattcagactcgctttcgctgcggctccgcatcttctgcttaaccttgcacgggatcgtaactcgccggttcattctacaaaaggcacgccatcacccgttaacgggctctgactacttgtaggcacacggtttcaggatctctttcactccccttccggggtgcttttcacctttccctcacggtactggttcactatcggtcactagggagtatttagccttgggagatggtcctcccggattccgacggaatttcacgtgttccgccgtactcaggatccactcaggagagaacgaagttttgactacagggctgttacctcctatggcgggcctttccagacctcttcatctacctcgttcctttgtaactccgtacagagtgtcctacaaccccaagaggcaagcctcttggtttgggctggtcccgtttcgctcgccgctactcagggaatcgcatttgctttctcttcctccgggtacttagatgtttcagttccccgggtctgccttctcatatcctatgtattcagatatggataccactccattacgagtggtgggtttccccattcggaaatctccggatcaaagcttgcttacagctccccgaagcatatcggtgttcgtcccgtccttcatcggctcctagtgccaaggcatccaccgtgcgccctttctaacttaaccgttaaaaagaatcactacgtgatatcttgcattactaattgaatgtgaattacttctgttatctagttttcaaagaacacgttggtggagcctagcgggatcgaaccgctgacctcctgcgtgcaaagcaggcgctctcccagctgagctaaggccccgtattgggtaaagatggtgggcctgagtggactcgaaccaccgacctcacgcttatcaggcgtgcgctctaaccagctgagctacaggcccatctaccatatgaaagaatcaaagttccttcaaaactaaacaagacagggaacgttctgtttataagacccaaggtcttatattccgttaaaatccttagaaaggaggtgatccagccgcaccttccgatacggctaccttgttacgacttcaccccaatcatctgtcccaccttcggcggctggctccataaaggttacctcaccgacttcgggtgttacaaactctcgtggtgtgacgggcggtgtgtacaaggcccgggaacgtattcaccgcggcatgctgatccgcgattactagcgattccagcttcacgcagtcgagttgcagactgcgatccgaactgagaacagatttgtgggattggcttaacctcgcggtttcgctgccctttgttctgtccattgtagcacgtgtgtagcccaggtcataaggggcatgatgatttgacgtcatccccaccttcctccggtttgtcaccggcagtcaccttagagtgcccaactgaatgctggcaactaagatcaagggttgcgctcgttgcgggacttaacccaacatctcacgacacgagctgacgacaaccatgcaccacctgtcactctgcccccgaaggggacgtcctatctctaggattgtcagaggatgtcaagacctggtaaggttcttcgcgttgcttcgaattaaaccacatgctccaccgcttgtgcgggcccccgtcaattcctttgagtttcagtcttgcgaccgtactccccaggcggagtgcttaatgcgttagctgcagcactaaggggcggaaaccccctaacacttagcactcatcgtttacggcgtggactaccagggtatctaatcctgttcgctccccacgctttcgctcctcagcgtcagttacagaccagagagtcgccttcgccactggtgttcctccacatctctacgcatttcaccgctacacgtggaattccactctcctcttctgcactcaagttccccagtttccaatgaccctccccggttgagccgggggctttcacatcagacttaagaaaccgcctgcgagccctttacgcccaataattccggacaacgcttgccacctacgtattaccgcggctgctggcacgtagttagccgtggctttctggttaggtaccgtcaaggtgccgccctatttgaacggcacttgttcttccctaacaacagagctttacgatccgaaaaccttcatcactcacgcggcgttgctccgtcagactttcgtccattgcggaagattccctactgctgcctcccgtaggagtctgggccgtgtctcagtcccagtgtggccgatcaccctctcaggtcggctacgcatcgtcgccttggtgagccgttacctcaccaactagctaatgcgccgcgggtccatctgtaagtggtagccgaagccaccttttatgtctgaaccatgcggttcaaacaaccatccggtattagccccggtttcccggagttatcccagtcttacaggcaggttacccacgtgttactcacccgtccgccgctaacatcagggagcaagctcccatctgtccgctcgacttgcatgtattaggcacgccgccagcgttcgtcctgagccaggatcaaactctccgataaagtagtttgactgactacgcacatcgctgtgcgatttatttaaaactttgaattaacaggtacgttttgtcttgtttagttttcaaagaacttttccgcccctctcgaagcgacctcttaatcataacattttcagtttgctaggtcaatacttttttaaaaaatattttcgctaggcttgcctttctattaaaaagacaacaaaaagaattatatcagcatcatcaccatgtgtcaaagcttttttttatttctttatatagtaaaagcgcagcctgttgcagctgcgctttttcgtttatacttcttccgtttcttccggctcttcttcattcttttcgacaagcgccacagtggctacatgctcttgatcagacatgcggatcagacggacgccttgtgttacgcgtcccgtagtggagatatcattaatatccattctgattaacacgccgcttgccgtaataatcattaagtcctcttcgccttttgttgctttcacagttactaacggaccgttgctgtcagtgattttacatgttttaaggccttttccgccccggctttgaactctgtattctgaagccggtgtgcgtttgccgtagccgttttctgtcactatgaggacatgggagtcttcttcaagaatctccatgcctacaacgacatcatcgtctgtcagcgtgatacctttaacacccgcagctgtgcgtcccatttgtcttacatcttcttcagggaaacggatcagcaaaccgttcttcgttccgatgatgatttgtttcttgccgtcagtcaggcggacggccatcagttcatcgtcttcccggagacctagggcgatcagaccgttattccgtatattcgcaaactgggacagtgccgtacgtttcgacaccccttgtttggtcgtaaagaagaggtattgctcctcatcaaacgtgctgaccggaataatggcattaatccattcgcctttttcaacttccagaaggttaataatcggaatgccttttgccgtacggccgtattcagggatttcatatcctttagaacggtataccttccctttattagagaagaacagaatcgtatcgtgcgttgatgtggaaattaagtgttccacaaagtcatcttcattcgttcccattccctgtacgccttttccgccccgtttttggctgcggtatgtggacgccgggagacgtttaacatagccgttatgggtcagtgtgatgacgatattttctctctcgataagatcttcatcttcaattgtttcaagaccggacgtcacgatttcagtgcgtctctcatcattgaaacgctctttgatttcattaagttcttcacggatgatctcaagaactctttcttcattggctaaaatatctttcagctcagcgataagcgcaacaagtgattgatattcctcttcaatcttttcgcgctccagaccggttaatcgctgaaggcgcatatccagaatagcttgcgcttgtttttcagtcagtgagaattgttcgatcaaacccgttctcgcaatttcagccgtctgggaattgcggataagagaaataacggcatctaaatgatcgagagcaattcttaaaccttccagaatgtgagctcttgcttccgctttgcggagttcgtaagccgttctgcgccggatcacaaccttttggtgatcaagataatgctccagacattgtttcaggcttagtaccttcggctgtccgtcaacgagcgccagcagattgattccgaaagacgtctgcagggccgtttgtttgtacaggttattcaaaatgacgtgagcattggcgtcacggcggatctcaatgacgattctcattccgttacggtcggattcgtctcgcagatcggtaattccttcgatttttttgtctcggacaagatccgcgattttttcaattaatctcgctttgttcacctgataaggaagttccgtgacaataattctttcttttcccgatgaagtctcttcgatttcagccttagcccggatcgtgattgatccccgtccggattcatatgccttgcggatgccgctccggcccaaaatctgacctgcagtcggaaaatccgggcccgggatgtattccatcagctcctggtttgtaatctcaggattctcacttacggcaagcacgccttcaatgacttccccaagctgatgcggggaatgtttgtcgccattccgaccgcaataccggcagccccgtttacgagcagattcggaaatctcgaaggcatgacggcaggctctctttctgaaccgtcatagttatcttgatagtcaatcgtgtctttcgtaatgtcacgcagaatttccattgcgatttttgacattctcgcttctgtgtaacgcatcgcggccgctgagtcgccgtcaaccgaaccgaagttgccgtgtccgtcaacaagcatgtagcggtagttaaaatcctgcgccattctgaccattgattcgtaaaccgctgagtcaccgtgcgggtggtacttaccgataacttcaccgacgatacgggcagattttttatatggtttgtcactggtcatgcctaaatcattcattgcgtacaaaatccgtctgtgaaccggcttcagaccgtcacgcacatccggaagcgcccgggatacgataacgctcattgcatagtccaggaaggatgtccgcatttcctgactgatattgacttcacgtacttgtggtgtgttttgttcactcattaaaaaaacctccctgaagtatcacatgaaataatgtgggagtagattgtccattatgatcttcaatacgatttcactattctccattatatcaataaacttgtgtttatacacattaatttagtagaatatacgggttttgcgggttttcagaggctttagaagccgctttgagaaaaaagccttatttcttaacgaaaataaggctttcttggttaaatatcaagatttttcacgtatctggcgtttgcttctatgaagtttctccgcggttctactttgtcacccatcagcatttcaaaagtctcgtcagcgtccattgcatcttcaagattgacttgcagaagcgttctggtcgcagggtccattgtcgtttcccaaagctgagtcgcgttcatttctccaagacctttataacgctggaggccgggcttaggtgattgcggaagctcttttaacagctcatcaagctgcttatcgttataagcgtattccacccgttttccctgctgcactttataaagcggcggctgggcaatgtagacatagccgttttcgatgatttcccgcatgtatctgtagaagaacgttaataaaagcgttctgatatgggcgccgtcaacatcggcatccgtcatgatgaccactttatgataacgcgctttttcaagattaaaatcttctccgattcctgttccgagggccgtgatcattgatctgacctcattgtttgagagaatcttatcaagtctggctttctcaacgttcagaatcttaccgcgcagcggcagaatggcttggaaatgacggtcccgtccctgtttcgctgatccgcccgcagagtcaccctctacgatatacagctcggaaatgctcggatctttagaagaacagtccgccagtttgcccggcagattggaaatctcaagcgcacttttgcgccgggtcaattcccgggcttttttcgccgccatccgcgctcttgcggccattaaacctttttcaacgattttgcgggctgagtccggattttcaagaaggaatgtttccagcgcagaagaaaacagcgtatcagtgatcgttctcgcttcggagttgccgagcttggttttcgtctgcccttcgaattgcggatcagggtgcttaattgaaataatggcagtcagcccttctctcacatcatccccgcttaaattcggatcattttctttgaaaatcccttttcttcttgcatagtcgtttatgacacgggtcagaccggttttaaatccggcctcgtgcgtgccgccttcgtatgtgttgatattatttgtgaaagaataaatattgcttgtatagctgtcgttgtattgcaatgcaacttcaaccgttatgccgtctttctcgccttcgatataaatcggctcttcatgaacgacttctttggaacggtttaagtactcaacatagcttttgattccgccttcgtagtggtactcgtttttccgttcttgtccttcacgtttgtcttcaatcgtgatgtttacgccttttgtcaggaaggccaattcccggacacggtttgaaagcagatcatagtcatatacagttgtttctttgaaaatttccgggtccggaacgaagtgcgtaatcgttccggtcttatcagtttcgccgatcacttcaagatcggccacaggtacaccgcgctcgtacgcctgataatggatttttccgtcacgatgaaccgtaacgtcaagagtggtcgacaaggcgtttacgacggatgcccctacaccgtgaagaccgccggatactttatatccgcttccgtcaaatttaccgccggcgtggagaacggtcatgatgacttcaaccgcagggcggcccatcttctcctggataccgaccggaattccgcgcccgttgtccttaacggtaatgctgttatctttttcaatctcgatgttaatatctgtacaataaccggccagggcttcgtcaatactgttgtcgacgatttcccacaccaaatggtgaaggcctttgctgttagttgatccgatgtacatccccggtctctttcgaacagcttccaaaccttctaatacctgtatctgattctcatcataactattttgctgctgttccatagccatgcacattcacctacacttttcttaaacgataatatattcattgtaaagatccgctaagaatctatttctaacataaattgcgcacgtttcttcagtgtgccggaagataagggagagtaatatatattctcagtcgtgactacgatagactttggcgtgccgtttacggacggcactactttttctttctgtctgtccagaaattcttcaacgatcggcgatacattgaccttgcagtcaaaaatgccgacgatatcgcgggttgaaacgacaaagtcgtcacctaaatgaatatacaatcgctcacctcatttcttcacttcactaacgcaccgttttccacacggaacattcctgcttgatgtaaggtatcgtggtcaatgccatccacgctcgtcgtggtgacaaatgtctgcacacggccttggatcgtatgaagcaaatgggactgtcggtaatcatccagctcgcttagtacatcatccaaaagtaaaatggggtattctccgatttcttcatgaatcaaatctatttcagccagctttagagacaaagccgtcgtacgctgctgtccctgcgaaccgtaagtctgcacatcgcgtccgttcacataaaaaaggacatcatcccgatgcggtccgaataatgtgacgcctcgttctatttctttttcttttaatttcgaaaaagactcctggtagctgttacctattttcgacaaatctttgggatctgatacatcaagcgccgtgtgatacttaagcgtcagttcttcaagtccccgggaaatgccggaatggatcggctgcgcccatttttcaagctgcgccgtaaactgcagacgtctggcgacaacttttgcggctgcttcaatcagctgatcagtgagaacgtcaagcatggtccggtcagtctgtttccggctttgcagctgtttcagaaaatgattccgctgtgaaaggattttttgataaagagataaatcatacagataaacggcagaaacctgcccgatctccatatcgagaaatcttctcctcacctgagggcttcctttgacgagatttaaatcctcaggggcaaacataatggtgttcagcgctccgacatactgactgagtttttgctgctctatatgattgaccttgccctttttaccttttttggagatgacaagctgcatcgggatgtccccgttgcgcttcatcactcttccttctattttagcatagtcttcgtcccaccgtataagttctttgtcatttgaggtgcggtgtgattttgccatcgaaaggacatagatggcttccatcagattggttttgccctgggcattttccccgatgatcacattcaccttgttttcgaattgaagctcagcgcgctcataattacggtaggatgttaattctaaattttggatatacaaccgctgtcacccgctttaattgacgacttgaaatgaaccaaatccttcaatcgcgaccacgtctccaacgtaaagctttctgccgcggcgattgtcaggttcattgttgacagtcacctcatgctcgctcagaaaccacttcgccatgccgccggactgaatcacatcagctaattttaaaaactggccaagcgtaatcatttctgtatcaatcgaaatcggatttgccataatatcgacctctttcaaatatcactaatatctaattgtactaaaaaatcctgaaataaggaaagggaaaacttgagggagcggctgatgaatagaaaagctgccgaactaagccggcagcacattctgtttgattaatacgttctgaccggaaggatgagctgaacgatggtctcatcattcggcgtacggataagaaacggtctcatcgctcccgtaaagctgatacggatgtccgctccttcaagtactttcagtgcgtccatcatatattttggactgaatgaaatatttaattcctcgccgtcaatcttgtctgccagcacagcttcgaccactttcccgatttccggagaatttgatgaaatctcaagcgaatccgccggtttggcagaaagttttacaacgttgttgcggccttctctcgccaataaagaagcacggtctatcgcctgtaaaaattccttcgtgttcacgacgatttccgttttgctttcctgcggaattaagctggtcgtgtccggatagtttccgtcaagcaatcttgagaagaacaatacgtttttcgctttgaacagaacttgggtttctgtaatgacgatatccaccagctcttggctgtcatcaagaattttgcttagctcggttaagcttttcccgggaatgaccacgttataagtactgtcttccggaatatcaagcttcgcctttcttaaagcgagtcggtggctatccgtggcagtgcataataattcaccgttttcaactttccagtttacacctgtcaagatggggcgtgtttctgaggcggacacagcgaacacggtttggcggatcaggtttttcaaaagatccgtcggaatctgaatggcgtgatgctcttcgatttgcggtagatgcggatattcatctgcatcaaggccgtttaaattaaattcggcttttccggaacggataatcgttaaatattgattttgaacttcgatttcaacagtcgccatcggcagttttttaacgatttcgctgaagaaacgcgcttgcagcacgatacttcccggctgatcgatcgtcacgatttctttatcatcatcttctttcggaatgaatgactcaattgaaatatcagagtcacttcctgtgaaagatactccttcatctgaggcgacgatcttaataccggtgagaatgggaattgtggttctggatgaaacggcttttagaacgtcttgtacactttcgactaaccgatctttttgaatcgtaaatttcatgtttatcctcctaacggataatataattaatatatttttaaaaatagcagtagtaatagtagggcctgtggatttgtggataagttgtgaaaaagacaggaaacacagcctatccacatgtggacagactgtgtatggctatgaaaaagttattcacactttccccgattcatccgaggacactattatttaagcagttcttttatttctttcacctgctgctgaagctgctcgtcatcaatcagcagttttgaaatcttttcgtgggcgtgaatgacggttgtatggtctctcccgccaaattcttccccgattttaggcaaagaagaatccgtcatttctcttgaaagatacatcgcaatttgtcttgggaaagccactgatttcgtacgctttttcgctttgaaatcttcaagcttaatgttgaactgctgtccgacaatccgctgaatctcttttatcgtaatgaccttcggcttagaagacggaataatatctttcaatgcttctgcagccaggtctgcgttaatgtctttattgattaaggatgaataggcgacaacccggattaatgccccttccagttcgcggatgttgctgtcaatctgattggcgatgtaaagcatgacctcgttcggaatatcaaggccctccgccttcgctttctttctcagaatggcaatccgcgtttccagatccggcggtgtgatgtctgtaatcaatccccattcgaaccgcgaacgcaggcggtcttcaagggtcgggatctctttcggcggtctgtcactggaaatcacgatttgtttgctttcttcatgaagtgtgttgaatgtatggaaaaactcttcctgtgtttgttcttttccggctaaaaattgaatatcatctatcaaaagtacatcaacgttccggtagcggttgcggaaatcaacggctttattatcgcggattgagttgatgaattcatttgtgaatttttcagaagacaggtacaccactttggctgaaggattatgatcaatgacataatggccgatcgcgtgcattaagtgggtttttcctaaaccgactcccccgtatataaataaagggttgtacgctttagcgggtgcttccgccacagccagtgatgctgcatgggcgaatcggtttcccgatccgatgacgaatgtgtcgaatgtatatttcgggttgagcatgctttggggaaaatcagacggttcctcttttgccgcttttttcacttgcggtttcggcaaaaagtcttcttcgtcctgattttgaggaatgacaaatttgacgctcaattcttccccggttaattcatatatggtatctgcaatgagatgtaagtacctggactccagccagtctctggcaaattcattgggagcggtgatggttaaggtatctccttgcagcgaatgggctttcgtcgacttcatccaagtttcgaaactcggtttgcttagctttttctcaatttgagctagagcttgattccaaagatccaatatattctccattatccggcacagccctccttttctttaaaaatcagcgcccttcccctgttatagaacacaaaaaaagagcatatggctctgaccattcgtacacacgaaatgttgaaaacatatagtatagtagaaaaatagcttttcgacaaattccacaagttgtggacaacaatctacacaagctgtgtgaaaacaatccacaacttatccacaatttgtggataaagagaatggactggataagtaattaagagttaaaacacaaatataatatcaaattaagcgaggacttgcaatggttctcgtaatcttatccacaaacctgacaacttgttgaaaaatctttgtccacaggggttagcaatgtgaaaatgttgtcgataacgattgtggatattaaaaaaagaccgaaaaattatccacatgtcgttttttcgggggagcgcggctttttttgtgcgttaaaaaaaggaatatgaaaaataaggtttctaatctggttaaggtatgttatcctattatggttgtaagaaataaaagcactgctgaagttgacaatgaataggcagcacaaatataataagtaagactgtctttaacagctattcctcgagggaggtgtcataaatgaaaagaacattccaaccgaataaccgtaaacgcagtaaagttcatggcttcagaagccgtatgagttcaaaaaacggtcgtctagtattagcacgccgtcgccgcaaaggcagaaaagtattatcagcttaggccactgaataatgtcagtggtcttttttcacattaagagaaaagagatgtcatgcgtcgcccggtactggagaaatttcttcagtattccggcggcccgttttttttagatagaaataaaagtttctgcgagtgaatatcggagtgaattaaagtgaagaagcgaaatcggttaaagaaaaatgaagattttcaaaaagtgtttaaacgcggaacgtctatggcaaaccgccagttcgtgctgtatacgcttgatcagccgaaacaggaagagctccgggtagggctttctgtcagtaaaaaaatcggcaatgccgtcgtgcgcaatcgggtgaagcggttaatcaggcaggcggttcaggaggaaaaagagctgctcaagccgaaagattttattattatcgcaagaaaacccgccggcgacctcagttttgaagaaacgaaaaagagtctgcagcacttattcagaaaaacctcattatataagaaatcttcgtcaaaatagctcatattttgttttcttcacgtttttaaaagcgcttccttttatttggcgaaaaatgaacgccatttgaaactgaaagatgctaaaatacatacaaggtttataaagattggtataggaggaaacgttcttgaaaaggagaatatggttactactgagtatggtcggtatgctcgtgctgctggccgggtgctcgagtgtgaaagagccgattacggcgaatagtccgcatttctgggacaaatatgttgtgtatccattgtcagaagtcattacgtacgtagcgaaactgacgggcgataactatggtttgtcgatcatcatcgttacgattttaattcgtctgctgattctgccgctgatgatcaagcagcttcgaagctcaaaagcgatgcaggcgctgcagcctgaaatgcagaagctcagagaaaaatacagctctaaagatcaaaaaacgcagcagaagcttcagcaggaaacaatggccctgttttcaaagcacggggtaaacccgctggcgggatgtttcccgatcctgattcaaatgccgattttgatcggattctaccacgccattatgcgtacgcaagccatttcacagcacagctttttatggtttgatttaggagagaaggatccttactatattcttcctatcgttgccggtgtggccacttttgtccagcagaagctgatgatggcgggaaatccgactcagaatcctcaaatggcaatgatggtatggattatgccgatcatgatcatcgtatttgcgatcaacttcccgagcgcgctttctctgtattgggtagtcggaaacctgtttatgattgctcagacattccttattaaaggacctgacattaaacacgatccggaaacgcagaaagccggaggaaagaaaaagtgaagaaggtgactgctgcgggacggaatgtcgaagaagcagttcaatcaggccttcaggaacttcaactgacgaaagatcaagtagaaataacggtggtgcaagaagaatataaagggtttttgggtattttcggaaaaaagaatgcgattgtagaactggaagagaaaagaaatcctgttcaggaagcgaaagcgtatttagaagaaatcatccattccattgccgggccttctgagattgttacggaagaaaacaagaaaacagtctgttttcatattaaaggtgaaaaagcggcgctgcttattggcaaaagaggacaaacactcaatgccttggaaacattgacgcagcttgttttgaaccgcggctccggccagtatcgccaagccgttgtcgacgctgaaaattatcggcggaaaagaagagaaattctggatcagctggcaaacaggctggccaagcaagtgtcgaaaacgaaaaaagaggtgcatttagaaccgatgccgtcaggtgaaagaaaaatcatccatgacgcgctgtcaaagcatccaaatatcaaaacgttttctaccggtgaaggccggtaccgccatctcgttatttcccataaagatagcagaaaaccgaagtccgggtaaaatcggaacttcggtttttttattggtaaaaatggctctattcctgagcagaatcgcattttttgcgtttaagttttttctttttaggtctatgctgttgataaaaaaggttttaggaaataaaattaattgttattcacatgtggataagttaaagtaataagggatgaatttctgcctttgtggataacgtatcttccacttcaaaccaaactatgttatcttttaattttggcgtaaataaaattttttatatagatggaaacagagataaagagaggtgaacagtatggatacaattgcagcgatttcaactccgatgggtgaaggcgcgattgcgatcgttcggctgagcggcccggaagccgtaaagatcgccgacaaaatgtacaagggtccgaaaggcaaaacgctcagttcggcagaatcgcataccattcattacgggcatatcgcggacagtacgacgggacggattattgaggaagtcatggtgtctgttttaagagcgcccagaacattcacaagggaagatgtcattgaaatcaactgtcacgggggtattgtgacggttaatcaggtgctccagcttgctttaagagaaggtgcgagactggcagaacccggtgagtttacgaagcgcgcatttttaaacggacggattgacctttcacaggcggaagcggtgatggatctgatcagagccaaaacggaccgtgccatgaatgtcgccatgaaccagatggaaggacggctttccgcgcttgtccgccgtctgcgtgatgagttgttagaaacacttgcccatgttgaggtaaatatagattatccggaatatgatgacgtcgaagaaatgacgcatcagcttttagtggagaaggcaagcggcgtgaagaaagaaatcgaggcgctgctccgtacgtctgagcaggggaaaattttgcgtgagggactgtctaccgtgatcatcggccgtccgaacgtcgggaaatcctctctgcttaacagccttgtccatgaaacgaaggcgatcgtaaccgatattccgggaacgacgcgtgatgtgattgaggaatatgtcaacgtgcgaggcgtgccgcttcggcttgtcgataccgccggaatccgtgagacagaagacatcgtcgaaagaatcggtgtggaacggtcacggcaggttctgaaggaagcggatctcattttgcttgtgcttaaccacagcgaagcgctttctgaagaagatgtgaaattgtttgaagcggttgagggaatggacgtcattgtcattatgaataagacggaccttgaggctaagattgacgctgagcgcgtcaaggaactggcgaaaggccggcctgtcgtcacgacctcattgctgaaagaagaaggcattcaagatttagaggaagcgattcagtcgctattttatacaggagcgatcgaaagcggagatctcacctatgtcagcaacacccgtcatatttcgattctgcatcaggcaaagcaagcgattgatgatgcgctgaacgggattgaacaggatgttccgattgatatggtgcaaattgatttgacaaggtgctgggaactgctgggcgaaatcatcggtgatgccgttcacgaaagcttaattgatcagctcttttcacaattttgtttaggtaaataaaagggaggaaaaaaccatggggtatgaagcaggccaatacgacgtgattgtcatcggcgccgggcatgccggtgttgaggctgccctcgcatccgcgcgccagggagccaaaacgcttgttttgacgattaatcttgatatggttgcgtttatgccatgtaatccgtctgtcggcggccccgcgaaagggattgtcgtccgcgaaattgacgcgctcggcggagaaatggctagaaatatagataaaactcatattcaaatgagaatgctgaatacaggaaaaggtccggccgtacgggcgctgcgtgcgcaggcggataaattccaatatcagcacgaaatgaagcatacgctggaaaaaacaccgaatttgacacttcttcaagggattgccgagcgtttaatcattgaagacggagagtgccgcggtgtcattacgcaaaccggtgctgaatacaaggcaaaaacggtcgtgctgacaaccggaacgtatttaagagggcggatcattctcggggatctgtcttactcaagcggtccgaataaccagcagccgtctattaaactttctgagcacttagaggagctcggttttgatctcgtccgttttaaaacgggcacgcctcctcgtgtctcaagcgattccattgattacagcaaaacagaaatccagccgggggacccggttccgcgcgctttctcatatgaaacggttgaatacattaccgatcagctgccttgctggctgacttacacgagtcctgagactcatgagatcatcgacagcaacctgcatcgttcgccgatgtattccggtatgattaaaggaacgggaccgagatactgcccttcgattgaagataaagtcgttcggtttaatgataaaccgcgccatcagattttccttgagccggaaggcagaaatacgcaggaagtatacgttcagggtctatccacgagtcttcctgaggacgtgcagcagcggatgctggcgaccattccgggactggaaaaggtgcagatgatgagagccggatacgcgattgagtatgacgcgattgtaccgacgcagctctggcctacactggagacgaaaaaaatccctaacctgtacacagccggtcaaattaacggtacatcaggttatgaggaagcagccgggcaaggaattatggcagggatcaacgcaggccgcaaagcgcttggaaaagaagaagtgatcctcagccgttccgatgcttatatcggtgtattgattgatgatttggtaacgaaaggaaccaatgaaccgtatcgtctgctgacttcacgggcggaatacagactgctgctccgtcacgacaacgcggatcttcgcctgacggaaatcggccatgagatcggcttaatttctgatgagcgctatgaagcgtttgagaagaaaaaagcggcgatcgaggcagagaaaaaacgtctctggtctgttattatcaagccgtctcctgagaatcaggaatatatccgttcactcggcggaagcgagctgaaagacggagtgcgcggcacagatttaatgaaacgtccggaaatgaactatgaaacagtgacaaaacttgcgcctgcagattctccggttccgcaagatgtggcggaacaagtggaaattcaggtgaaatatgaaggatatatcgaaaaatccttgcagcaagtggaaaagctgaagaaaatggaaaacaaaaaaatccctgatcggattgattatgacgccattaaaggaattgctactgaagcgcgtcaaaagctgaaagaagtgcgtcctttatcagttgctcaagcgtcccgtatttccggcgtcaatccggcagacatttcaatcctgctggtatacctggagcagggccgtattgccaaggtagctgaatagaaaggatgacggcatgaatatagagcaatttacatccagtttagcggagaaagggatttccctttctgaccgccagctggagcaattcgagttgtattaccggatgctcgtggaatggaacgaaaaaatgaatctgacatccatcactgagaaaaaggaagtttatctcaagcatttttatgattcgataacggcggcattttatattgattttgaaaaggtcaccactctttgtgacgtcggcgccggcgccggttttccaagcctgcccgtcaaaatctgcttcccgcatctgcatgtcaccatcgtcgattcactgaataagcggattacgtttttggaaactctctctgatgctttacaattagagcatacgacatttgtccatgacagagcggagacattcggacagcggaaagacgtccgggaaagcttcgatctcgtgacggcccgtgcggtggcgcgtctgtcggtcctgagtgagctttgtctgccgctggccaagaaaaacggtatttttgcggcattaaaagctgcagccgctgatgaagagctgaaagcggggcaaaaggcgattaaagtattgggaggagagcttgaacaagttcattcctttacacttcccgttgaagaaagtgaacggaacattatgatcattcgcaagacgaaaagcactccgaaaaaatatccgagaaaaccgggtactccaaataaatcgccaattgaagggtaatttagacagcctgatgtgacaattccatcatattttctgcaaaattgatgaagatacagcaggaaaaaccatgagaaaatagaattataaaaatggcagtttttaaaggtggtgtaggtacatgaagcattcattctctcgtttcttcgggtttggtgagaaggaagaggaaccggagatagctgagcatgatacaaacaaagaagagatactcgaaataccggtacatgctatcgttcccaaccgttttcagccacgcaccattttctcagatgaaaaaatcaaagagttagcaatgactatccatacacacggcatcattcagccgattgttgtcagacatacagaagatgaaggacaatatgagctcattgcgggtgaaaggcgctggagagcggtacagacgcttgaatgggagaagattcccgcaattattaaagatttttctgatacggaaacagcatctgtcgctttgattgaaaacctgcaaagggaagaattgtcctccattgaggaagctcatgcgtacgcaaggctgttagaacttcatgatttaacacaggaagccttggcgcagcgcttaggaaaaggccagtcaacgattgcgaacaagctccgattgttaaagctcccggaacccgtccaggatgcgattatggagaaaaaaattacggaacgtcatgcaagagcactgattccgctcaaacagccggagtttcaggtcacattgcttgcggaaatcattgagaaaagcttaaacgtcaagcagacagaagacagagtggtgaaaatgcttgaacagaataagcagaaaccaaagccgagacgcaaagcgttcagcagggatacaagaattgcgatgaatacgattcgtcagtcactgtccatggtggaagacagcggcgtcaggctgaacactgaagaagaagaattcgaagagtacatccagcttaccattcggatacctaaataaaaactctcctgatcagcaggggagtttttattttaatcaaaaaactattttgagataatgatagatttattgtgcactatacattatatatgtaaaattttatctttttgtgtcgtgaattgtctttttacagtcaaaaaagtcactttatcggagaacttatattagaaagtgtctttttcgtttacatttttttcacttgctgataaacaaattatgaaaaaaataaaacgctttactctttttttgataagatagaaacaagacagtacatgttcatgtgaaggtaggtgacatcgtgggaaaaatcatagcaattacgaaccaaaaaggcggagtcgggaagacgacgacttctgtcaatctgggggcttgcttggcttacataggtaaaagggttcttcttgttgatattgatccgcagggcaatgcaacgagcggattagggattgaaaaagccgatgtggatcattgtgtgtacgacattttagtagatgatgcagatgttacagatattattaaaccgacttcagtagagaacttagatgtcattccggccacgatccagcttgcgggagcggaaatcgaattggttccgacgatctcacgggaggtcaggctgaaaagagcattagaatctgtgaaacaaaattacgattacatgattattgattgtcctccgtctctcgggttattaacgattaatgcgcttaccgcttcagattcagtcgttatcccggttcagtgcgaatactacgctcttgaaggattgagtcaattattaaatacagttcggcttgtgcaaaaacatttaaataccgacttaatgatagaaggagtgcttctgacgatgcttgatgccagaacgaatctcggcattcaagtgatagaagaggtaaagaaatactttagagataaagtgtatcaaaccattattcctcgcaatgtccgtttaagtgaggcgccgagtcacggcaagccgatcatattatacgatccgcgttcgagaggtgcggaagtatatttagatttagcaaaggaagtggcagcgaatggctaaaggcgggctcggaaaagggattaacgcgttgtttaatcaggttgatttgtctgaagagacagtggaagaaattaaaatcagtgatttacgccccaatccttatcagccaagaaaacaatttgatgatgagtcattagctgaactgaaggaatccatcattcagcatggcattcttcagcccattatcgtgagaaaatcattgaagggctatgatattgtagccggcgaacgccgttaccgcgccgcaaaacttgccggtaaagagacagtgccggctatcgtgcgggatttatctgaatcgctgatgcgggaaatcgctcttttggaaaaccttcagcgtgaagacttatcaccgcttgaagaagctctggcatatgactcactgctgaagcatttggatttaacccaggaacagctcgctaaacggctcgggaaaagcaggcctcatattgccaaccatttaagactgctgacgctgccggaaagcatccagaacctcattgcagaaggtacgttatccatgggacacggcagaaccttgcttggcttgaaaaataaaaacaagcttgaaccgcttgtgaagaaagtggttgaagaacagctgaacgtccgccagcttgagcagctgattcagcagttaaacaacaatgttccacgtgaaacaaagaaaaaagaacctgttcaagatgttgtgttaaaagagcgggaatcgtatttgcaaaattacttcggaacaacagtcaatattaagagacaaaagaaaaaagggaagattgagattgagtttttctcaaatgaagatcttgaacgtatcctggaactattgtccgaaagagaagcgtaaaaaccatcttttttaaaaaagatggttttttatatacgtcttgtcagcttatgaaacggactgagccgttcctgccggccttctgatttatctgtcagctgtaacccctctgctaaaacatttgccatgctcataacaagatgaagcctcgtattctgcaggacaaaatactccataaacccgctgacattgacgattccattgatatggacgtcaccgatttcaggaaggtctttttgaacacctgctccgggcttcagcggcccatcgccgatttgaaatgagcctacgcttttgacgcggcctaaacaagcatcaaccgctataataaacggatttttatgtagatgttgaatatctttcagcttgtctttcatattgacggcgtgaacaggatctgacagcgtgccgtaaacgtgcaatctgcctaaattcattttttctaactttgttcctacgagcggacctaatgaatctccggtcgaccgatctgtaccgatacacacggtgactaacggtctgccggctgctttacgtaaagatgaagtaaggattgcttgtatttgattcgcagcagaagaatccgtatgggatacatattgttttgcccgttcttgagaaaaaagcccgccttttcgattcataaggttcacttccttgtcatgtcatacgagtattacattgttgtttttggtgatgtatggttgtttacagtatatccagcgctgcctttttttatgcttatgtcatgatgagcatgccggttgtttgaaaagagcggatagaaaaaagaactcagagcagttattctctaagttcatgaaagaaataagaccatatgatctacatcaacatattgctgatgatctaattccagcgctcttttttctgcagagaagaggataatcctaactgagcgcagagtttttttgcgggttccatttgttgaagtaacagagagatggagctgttctgtgtctttcatcttttttgcccggctgatggcttccgtcattaaagcttttcccgcgcctgaccctaggtgtttgggggaaatatacatagaaccgataaccgcaatgtgtcttagtttaaacagcagatgcttggagatcttgaggattcctatcaggctgtcttgttcaaaggcgccaagcaagatggcattgccggcttcaagcctggctttgcatttttcggacggcctcatagctgacggcgattgcgtccgggtgatcttttaaagctttgagcctgaatcggagtaaggctgggtatcacttgcggttaaacgcctgatgtccatgatttgagcgcctaacataaataaattttctgaatagtcaatcgtcgttatcataccatatttgtcccatttgtatgaatgtttgctgctgtcactcaatatagtagcaatatgcggagatgatcagaaattttatgaggtgatgagggtgtggagagccgggatgaagtggatgctgctcatattaagcagccagattggggccgggtatgcaagcgggcaggaaatatggcagtttttcggtgtcgaaagcggactggctattgtattgtttacagtcatgtttacgatttcggcttatattgtgttgaagatcagctatcgggttcaatcaacgcactttttacctgtgcttgagcatctgatgggaccggctcttgctaaagtctatgatgtgcttattatgttttatttgttttcaatgacgatggttatgattgccggcggcggtgtgacgctgcaaatgtacaagctgccgttttggatcggtatttttcttctttgcattgtgaccgtgggtttattcttttgggatataaaagggatattatctctgaatagtattttgataccgattcttgtagcggggctgttatatgcattggtcttttttcagacaacgcatcattacacgtggacgatagacttgacccgccagtataattggccggcaagcattaccttcacgtccttaaacattctttctgttgtcgctgttctttcttcaatcgggaaagatatgaagggactgggagaagccaaaatcgcaagcgttgcaagcgggctgattttcggtatgatttcatttgtttacaatgaaacgcttgtacagctttcaggcagtcttacacaatatgagattcctcttttcgccgtccttgaaggcgctccttatccgttatttctttgtatggccgccgtgctttttttagccatctatacgacaacggtgaccggtcttttcgggctgtccagccgcatgcttgcatttgtgaaattgccgagatggacgctcgtatctcttcttttagctgtgatggtgccttttacgacaatcggtttttcagatttgatcgccattttatatcccatttacgggcttttaagtctttatttgctggtatgtcttcttctttaccctattttagggagatggaaaaaagtataatgctcattttgagtgcggccgttgctcttatcctgtctttttttgtacaataaataaagcagtctatggagagaggtgaagggtcttggcggataaagactttggcctgaatgatattgttgaaatgaagaaaccgcatccttgcggtgaaaacaggtggaaaatcattcggatgggaatggatattcggatcaaatgcacgggttgttcccacagtgtcatgattccgagaagagattttgagagaaagctgaaaaaagtactcgtcaagcatgaggagcctacatcataagggctggcgctcatgctttttcatatagaggagaggaagaggcccgatgagcaaagtgcatcagtcagcgtgcccgctgaattgctgggacagctgcggctttttggtgacagttgaggatggaaaggtgacgaaagtagacggagacccgaatcatcccattacggaagggaaaatttgcggccggggcagaatgctggagacgaaaacgaatgcgccggaacggcttcgttttcctttaaaaaagaaagacggcgaatttgtccgcatttcctgggagcaggcgttagatgaaattgctgaaaaaatgacggtgattaaggagacgttgggcactgccgcagtgctgcacagtcatgactacgccaataacggtcttttgaaggcgctcgaccagcgttttttcaatggatacggcggtgtaaccgagattgcgggcagcatttgctggggttccggcattgaagcgcagcgctgggatttcgggcgttcttacgggcatggaccgcttgatatttatcacagcaagcatgtgatcgtatggggcagaaacgtgtcccggacgaatatgcacctctatcatcatctgcagcaggtgaagaaaaaaggagcgacactgacggtcattgaccctatttttaacccgactgcaaagcttgccgaccggtatatatccgtcaaacccggcatggatggctggcttgcggcgggtgttttaaaaatattatgccaaaccggcagaaccgattctgattttattcaaaagcattcggtcggttttgaggaaatagacaagcttctgcagacgatttcttttgaggagatcattgagaaaacagaaacgtctttagaagcgcttgaatatcttgccgatttatatgctgacggtcccgcctccacttttatgggtcttgggatgcagagatataaaaacgggggcgggacgatacggtggattgacgctttagctgcggcgagcggaaatgtcggtatcaaaggcggcggcgccaacttcggaaatgtgcaagtcggtgaaagctttgcaaaggccgagctcactcgtcctgatttgaagaaaagttcgagaacgttttcgatgatgactcaagctgaagaggcgctgaatgcagccgacccgccgattgagatgatcatcgtgacgtgcggcaatccgctgacacaggtgccgaatacaaaaaaagtgaaggaagcgtttgaaaaaacgccggtcacagtggccattgattcggtcatgaccgatacggcgaagctctgtgactatgtgctgccgacggccgttgttttcgaagaggaagatatttattattccagcatgtatcatcactatgttcaatatggtaagaagcttgcggaaccgcagggagaggcaaaatcagaccgctggatctggacggaactcgcaaagcgtctcggattcggggagctgtttgattacagtgcggaagatttcttaaaaatggggctctcttctttggagaaagaaggaatcacccttgagcaattaaaggaaaaaggacatatgccgcttccggttaaacaggttccgtggagtgattttcaatttttaaccccgagcggaaaatttgaattcgtctcgtcactggcagaagagaaaggatacagcggcctccctcaattggaagtgccggaggagtccgtttatcacgacgccggactggccgggaaatatccgtatacgctgctgtccattcacccgcagcgctccaatcattcacagcacgtgccgtttattgaaaagctccagcagattcaggtggacctgtcgccggatatcgccgaggagctttcacttcaagacggagatacggcagaggtatacaatgaccgcggccgtctgcgcggcagggtgaaaatcatgaagcaggctcacccgaagacggtgaatatagatgaaggcatgtgggcggcattcggaggctccgtcaacatgctcacaaaggattcaaattccgataatggaatgggaagtacgctttttgactgtctggtagcggttaaaaaagggtaatctaaggagagagagggcgggaaatgcttttttctcagcttgtcttttcctatgaacctccttataattgctctaggtttacaatacgtttatacgatgatggtttgatatagaggagatgaaagaatggctttaactgctggaattgtcggtttgccgaatgtcggaaaatcgacgttatttaatgcaattacccaggctggtgccgaatcagccaactacccgttctgtacaattgatccgaacgtgggaatcgtggaagtgccggatgaacgtctgcaaaagctgactgaattggtgaacccgaaaaaaacagtgccgactgcgtttgaattcactgatatcgcggggatcgtaaaaggcgcatctaaaggtgaaggactcggaaataagtttctttctcatatccgtcaggttgatgcgatctgccacgttgtacgtgcattcgctgatgacaatattacgcacgtgtcagggaaagtcgatccgattgacgatattgaaacgatcaatcttgaattgattcttgccgacatggagacagtcgaaaaacgcatcacgcgtgtaagcaagcttgcgaagcaaaaagacaaagaagcggtttttgaatttgacattctgtctaaattgaaagaagctttcgaacaagaaaagcctgcccgttccgttgaatttacggaagaacagcaaaagcttgtgaagcagcttcatttgcttacgtcaaaacccgtgctttatgtggcgaatgtaagcgaagatgaagtggctgatccttcagacaatgaatacgttgcgaaaatccgtgagtacgccgcgggtgaaaatgccgaagttatcgtcgtctgtgcgaaaattgagtctgaaattgctgaattggaaggcgaagaaaagcaaatgttccttgaggagctcggcatcgaagaatcaggtcttgatcagctgattaaagcgtcatactctcttctcggccttgcgacatactttacggcgggcgaacaggaagtgcgcgcatggacattcagaaaaggcatgaaagctcctgagtgtgcgggtatcatccacactgactttgaacgcggctttatccgcgctgaaacggttgcttatgaagaccttttggcaggcggcggaatgtccggagcgaaagaagccggaaaagtgcgtctggaaggtaaggaatatgtagtccaagacggagatgtcattcatttccgatttaatgtataggacacagttgtaaagggacaagagctttggtataatataaacttgtgagtaatagaattattgctccttgcccattatagggccgcttagaccaaaaggaggtgcaaacagatgaaaaagtacgaagttatgtacattatccgtccgaacattgacgaagagtcaaagaaggcagttatcgagcgtttcaacaacgtattgacttctaacggagcggagatcactggaacaaaagattggggtaaacgtcgtcttgcttacgaaatcaacgatttccgtgacggtttctaccaaatcttaaacgttcagtctgaagctgcagcggttgctgaattcgaccgtttagctaagatcagtgacgatatcattcgccacatcgttgttaaagaagaagaataagcaatttgaaatatataatgttaaaaggtggtctttcatatgcttaaccgagttgtattagtcggaagactgacaaaagacccagagcttcgttatacgccaagcggtgcggctgtcgccacgtttactcttgctgtgaatcgtacattcacgaaccagtccggagaacgtgaagccgatttcattaattgtgtcacttggagaagacaagccgaaaacgttgcaaactttcttaaaaaaggaagccttgccggcgtagacggccgactccagacaagaaattatgaaaatcagcagggacagcgtgtcttcgtgacagaagtccaagctgaaagtgttcaatttcttgagcctaaaaacagcggcggttctggatcaggcggatacaacgaaggaaacagcggcggaggccaatactttggcggaggccaaaatgataatccgttcggcggaaatcagaacaaccagagacgaaatcaagggaacagctttaatgatgatccatttgccaacgacggcaagccgattgacatctcggatgatgatcttccgttctaatagattatcgctatattcataacgagaaaggtgggaaatgacaatggcaggaggacgcagaggcggtcgtgcgaaacgccgtaaggtttgttacttcacttctaacggcattacgcacatcgattacaaagatgtagatcttcttagaaagtttgtttctgagcgtggtaaaatcttacctcgccgtgtaactggaacaaacgcgaaataccaacgtaaattgactatcgcgatcaaacgcgcacgtcaaatggctttacttccatacgtaactggcgagtaagccgaaagaaaagagcaagagcctgcgggctcctgctctttttttatatcagtcctcctccatcctgccgaaatgtttcacatgaaacatggaagtgctcctgacatctatctttgttatcttgctcctctattcaaatacgcgtacttatgcaatgaatttgtttatactgaagaacagggggtggctgagatggagacagacagaaatatcctgactgatgaaaagtggagcgcaatcatacgcaatgatgcttcttatgacggggcattttattatgcagtaaagacgacggggattttctgccggccttcttgtaaatcgagagctccgaataaagaaaacgtgctggtgtttgatacggctgatgcagcgcttgataaacattttcgtccctgtaaaaggtgccggccgaacggtcttcgtcttcctgatgaagaatggattgctcaaatcattgagtacattgaccgccattatcacgaatctctgactctgagtgtactggccgaaatgtgtcacggcagcccttatcatttacagcggacatttaaaaaaatcaggggaatatccccgattgagtatatacagaacataagattggcgaaggcggaacaccttttaaagcatactgatatgacagtcatggagattgctctgacggtcggaattccaaacacagcgcattttgccactctttttaaaaagagaaccgggaattcgcccacagaataccgaaaaactgccggaatgggacagggaggttcaatatgagtaaagagacaatggtctattggacacttttcacacggaatgattggagcctgtatacagccgccacatctaaagggctttgctttataggttcaaatcatggaagctttgaagagcttgagcagtgggcaaaaaaatcactgccgcaataccgattggcacgtgatgatgagaagctggcgtcttacacggcagagctgtccgagtacatcgaaaatggcagatcagctttttcagtgccggtggatctttacgggacagaatttcagcttgctgtatggaaagcgcttatggacataccgtacggcgagacatactcctattcggatatagcagaaatgattcagaaaccggcagccgtaagagccgtgggcgccgcaatcgggaaaaatccggtattgattacggttccgtgccatcgcgtcatcggaaaaaacggaaaactgaccggattcagaggcggtttagaaatgaaaaagcagatgctggcattagagggcggaaacattgaaacactggaatgccggctgagccggacaggggggaacacatgaaactgatttcttggaatgtaaacggcttacgtgccgtgatgaaaaagatagatatcaatacttacgttcaggaaacgaaagccgatattttatgtctgcaagaaacgaaagtacaggacggacaagtatcattacagcttgaagggtatcatgactattggaactacgcggtgaaaaaaggctactcaggcacggctgttttttcgaaagaaaagccgcttcacgtgttttatggactgggaattgacgatcatgatcaagaaggacgggtgatcacacttgaatttgagaacctgttcgtcgtcaactgttatacgccgaatgccaaacgcggattagagcgaattgattaccgtcttcaatgggaagccgattttaaggagtatctgcagaagcttgaccggaagaagcccgtgatattatgcggcgatctgaatgtcgcacacagggagatagatttaaaaaatccgaaagccaaccggaagaacgccggtttctcggatcaggagcgggaagcgttcagcgccctgctgaacaccggatttaccgactcattccgctatttatatcctgatcgggaaggcgcctattcctggtggtcttacaggacgaacgcacgtgagaaaaacatcggctggcggcttgattacgtcattgtttcagacagactgaagccgcggatcagcgaagcggccatttgcgccgatatcatgggttctgaccattgccctgttgaaatgacagtggatttatgatgagatagcagtaagagaaatccactcttgctgcttttttatcaccaaaaatggaggagcacatggcaaatataaaagagattgcgaaactggcgaatgtgtcggtggctaccgtatcacgcgtattaaaccgacacccgtacgtatctgaggagaaaaggcgtcttgtgaatcaagtgatgaaggagatggattatacccctaatcgaaccgccattgatctgattcgaggaaagaccaatacaatcggcgtgattttgccgtacagcgaccatccctgctttgacaaaattgtaaacggtatcacgaaggaagcgtttgcccatgattacgtgacaacccttctccccaccaactatgaccccgctatagagatgacctatttcgaactgctgaaaatgaaaaagattgacggactgattgtcacgtcccgcgcgaatgaatgggaaaccgctgtgccttatctggagtacggtcccattgtcgcttgtgaatatacgcagcatcaagagattccctgcgcttataatgacaggcaggcagcttacagagaaagctttttgtatttgaaaaaccgcgggcatcaagatgttgcttttacatgtgtgcgggaagcggaaaaaagcccgagtacggccgacaaggtaaccgcatataaggcggttttcggctctcttgatgaaacccgcattctgatcggatgccatgatatggacgacggaaagcgggcaggtgaacacttctggggtttccacaaggcgccgacggccatctatgcgcacagtgatgatgtggctgccggcttgtaccagtttgcgaaagaacagaaatgggacgcggagatcatcggcgagggaaacctgagcgtcagccgggcattgaatatcccatctctggaacttcatttggaacgggtcggaagggaagcatttttgctgtttttgcacggagaaacggctaaaaaacaaattatgcatcaatttcagcggaaaaagtcttgagctgaaatgggtttcatgctttataactagattgagaaaaaaaaaggaggcggacatatgcgaattgaacatgcggccatatgggtgaaagatttagaacggatgaaagaattttatgagaaatacttcggcgccaaggccaatgacctttatcataatgagaaaaaagatttcaaatcgtattttctttcgtttgactccggatgcaggctggaacttatgaaaaaaggcggcattgatgaagctccgtcacagaatatgaccggatgggcgcatctcgcattttctacaggcagcaaggagcgggtgaatgaattgacggagacgtttaaaaatgacggatttcaggttgtaagcggcccgcgcgtgacgggtgacggatattatgagagcgtgatagaggatggggaaggcaatttgatagaaatcacagtgtaacagtgcgggggaacccgcactgttttattgattaaatttgctgagcattagttttcggaccgaatagaattaacaaaacggaacatagaagccagcagccgccgatgaacaaaaagacgctgatgtagccgagcttaacggcaataaatccgacgagcagggatccgaatatattggaaaaacggccgagcccgtatgccagcccgctcccggccgagcgatattccgtaggatacggctccgatgtatatgcgtataagtttgaggtgaaaacccgttccgtgacattgacgacaaatccaaacacaataatcatgacgggaataaacgtcatgccgtataacagtccggcaatggcagtcagaaaagcgcttgcggccagaatccattttctttggaacgtctcggatatcatggaaccgagcaatgcgccaagcggtgcgccgacagagtgaagcacattgtaccacagcgttttttccatggtgatgccgttgcttttcagcaggctgggcacccatgaagcaaagccgtaaaagccaaaggtttcaagaatccataccgctgacaggatgatggtgatctttaaattcctgccctgaaacagccctaagtagcctgcgtgcttcactgtatgtacttctgccgcctcttttggcgcgggaagcgggcctttttctttctctatacgtgcttcaagacggttcataatggcgtttgcctgatcatatgcgccccgattttcgtgccagcgcggcgattcctcaagccggcggataaaaaagaaataaatgagaccggccgccccccatacgaatacgagccgccacccccatgagcctaaaggaatgacaaaagcggaaacaacgtttgtgacgggaacgccgatcagtccgatcatggcgcaaaaggagatgtattttcctcgtacggatgatggaaaaaattccgccaaatagctgttcgtcacaatcatggcggccgcgacgccgagcccggtcaagaagcggaaaatcattaaggacggaatgtcccatgccagcgcattcagaaaagatgagatcgaaaagacaaggacaaaacaattcagcgcttttttcctgccgatccgatcggacagtcttccgccgatggaggcgcctaaaaacatgcccaggaaggatgcggctgtgacgtcggcaatgacggacagcttcacgccccaatgctcaatcagcgccggagccacgttgctgagcgtaaacagatcagcgagatcgaaaaaatagatgattccgagagcggttaatacttgatagtgcacacgcgaaatggggagacggtctaatcggttcgctacatttgagaatgtctgatgtttcataaaaaaccccctgacttagcaattgtaatcagaaaatactgtaaatttatctgacgaatacattataaaggtctttttttggcaaaaacagagtgtaaataaccagagccaaaggaaacggcatagcgctttcttcttaaaatatataacatttcctatatctgtttctgtttatattgtaaaatgttgaaggaaaggaagttgatgcataaatatgaatacatttgtacggcccgcagagggaagaaatagtgtatcgagatatcttctttctctgttgctcattgtgggtttgttctttttcggaagcatactgaccgtgttttatatgtttctcacgtccgctttcaatccttcactgacgataaattgggatgaggcggcattaagtgacccgctggcggatatttatttacagcatatcgtctatttcatagcgattccgggcatttggatagcggttcgtttcattatgaagcggcggtttttatccatcattacaccgaatcagtcgctgaactggaagagaattttctttggattcggcacatatgttgtgctgatgtttgtcgcggggctgattgattttttaattcatccggatcgtttcacgcttcaggaattccatgcttcacgttttctgctgctgttagcggcggccgtcttgttggtgccgattcaaacctctgcggaggaatttctctttcgcggttttctgcttcagtttgccggaaaattgacggcaaacgcggtggttctgacggtcattatcggcggattattcggcgcacttcatttcggaaatccggagatggaaaatggagctctctgggcgggaatcggatatgttaccatcggcatgatctggacctttatcacgattaaaacgggcagtctggagatgtcccttggcggtcacgctgccaataatatgtttttatttatctttctcacagaggatcattcggtatacggcggcattccgtcgatatttacaacagcagccggcggctatgaaatatacgattgcatatcgactctggtgatcaacatcatcttcgcatggctcgcattccgttttgtgaaaaaagaaaagcagcaggccgcctaggctctgctgctgatttgtaaggtgttcatcgcttcatcaatatccgtcgtcggcctccggcaggcgaaattctcacaaatgtagaccgttgtcttcccatcgatcatttgataacccgcggcaaagtcagaaatgccggcaagctcatccggatgttctgcggcgagaatcgtataggcgggagtgaaatgctcctgaagcgcctcaatgaaacgttttctgtccgggtcatctttccttccgaacacaacgatttctttttggggcattgtgtgtgccagtacgctttgcatgaagaaagcgctgctgctcggataggcctctatttcccgtttgaacacggaaaacatcgcttcggctttttcaatcagtgatacatcacccgtcaggcggccgagacgaagcaactgtacggcagccgcgctgtttccggaaggcacggctccgtcataaacctctttttccctgacaagaagagtctcggcatcattccccgtaaagaaaaaacctccgtgccgttcatcccagaacagctccagcatgcttgtacataacgttttcgctttctgcagataagacggatgaaaacccgcttcatacaattcaaggtaagcccagatgagaaaagcgtaatcatcgataaaccctttgtttttcacttcgccctcgcggtatcggaccatgacgcgcccgtccggcatgaggtgacgttcgagaaagcggatcgctgtttccgccatgctgagaaagtcaggctcgtgaaatacctttgcggcttttgccagcccggcaatcatgagcgcgttccatgaggtcagcactttgtcatctgtatgcggatagcttctgttttcacgcgcttccagcaattttgttcttgcctcttcaaggcgttcggccagctcatgtccggtgaggccggtctcttcgaggatggcctcacgccgcgtgaaaatgaggtgcgggatgttttcgccttcaaaattgccttgatctgtgatgttatacaccttgcaataaagcgggccgagttcatcaccgagaagattcatgatttcttttttggaccatatgtaatatttcccctcacggccttcggtatcagcatctaaagctgagaaaaagctgccgtcttcatgcatcatttcccgctgaataaacgttacgatctgcatcgcaatctgtttgtagcgctcattacccgtgacttgataggcttccgtataggcggtcaggagaagggcgttgtcatacagcattttctcaaaatgcggcacgagccattcattatcagtcgagtagcgggcgaatccgaacccgatgtgatcaaaaattccgccgttcgccatgccgtcgagtgtcttggttacgccggccaaagcctgttccttgcccgtatagctgtagtagcgaagcagaaacatgagcatatgcggcatcggaaatttcggagcctggccgaacccgccgtacaccgtgtcaaacccgccggccagctggcgatacgtgtcatgaaccgcctgttcgccaagcatgccctcagccgggtgaatcttgacttcaagatgagcggcggcgttttcggcgatatcctcgacatgctgccggtcattcgcaaacgtttcggacagatgttcaagcacatcaataaagcccggacggttaaatttgctcgtcttcggaaaatacgtccccgcataaaacggcttctgatctggtgtgacgaacacgttcagcggccacccgccctgccccgtcatcagctggcagattctcatatacacggaatccacatcaggccgctcttcacgatcaaccttgatggctatgaatttatcgtttaacataccggcgatctcttcgtcctcaaaggactcgtgagccattacatggcaccaatgacaagtcgaatagccgatgctgacaagaaccggcttgttttcgcgttttgctttttcgaaggcttcttctccccaagggtgccagtttacggggttgtgggcgtgttgaagtaaatatggagatttctcagcgattaatctattgggtgtactgttatttggcattggatcaccttctttcacttttaaattggttgctatttttactttaccataatggagtttagtttataccttattagattaactagattagattttatctactcgtctaaggaacaccagtcattttgcgcacaatttttttgcaaaataaagacttataaacatttgctgtttcttgtaaagtggtaactaataaagaaataatgaaacaaacgatagaggtttagtacaaatttataagacgttgattatttatacaggaggagagaattaacaatggcatatttatatttattgctcgcaatttttggtgaacttattggttcctctatgctcaaggccgcagaaggcttcacgaaactttaccctactattggtgcaattattgcttttataggttcctttttcttcttatcacttgcaatgaagtccatacctttgaataccgcctatgcagtttggtctggtgtagggactattgctactacaataatttcgattttgatttggaaagaaaaaattaacattgccagtgttactgggattgttttgatacttgtaggagttgtaatattaaatctttttggacctggtcatggtgaagcacatagtgttgaaaacgcaagcgcaacaacaaacaatgaaaaaataattgagtagtgaactgtttgatagtgaagtctataaaacctcacttttttatttatagtcatataatatttgaatgtcatcatctttcatgaaaagtaaagtctcttcgtttttaagttgttcaattgcttcattgactgtttgatccaatttagatttgggtctgtccttttcttctctaccgaccaaaaaatcagtggatacatcatataaatcagcgagtttctttaatgtctccggatcgggcgatctataatccctttcgtaattagacaatgtctaccctgttaatccaattttctctgctggcacgtcttgattagagtaaccggatttttttcgagcccattttaatctttggcctaatgtcatttgttatcatccattccacaaagagttgattaattattataatatcagcaattgctgaccctttcataaagtagaacaaaaaggcgaacattaacctttgactctccgaatcggagggttaaacttaatctgtagttttattcattttgttgtctcgtccatactttcgtaaaaattctccgaaggcatcttgaagcacaaaaaagctctgactaattaatttagtcagagcttttttttatgaagtattcccgagtatctgtccttgtttttttaggcaatactacgtccaattctttatttaaccatgcgagcgttttattacgaagataattacgcatctgttcttctgcttcaagcattaccaagttaattgtacaagaagaattgctggattcacaagagttgcatttgtctcgataaagtagaccattgcttacaatatttttacattggaaaatgggttttggtccttcaacagcctctattacatcccaaaaggaaatatcctccggggattttgctaacctatatcctccctttacaccagggacagaatttacaataccagctttagataatttaccgaaaacttttgaaagaaatgtttctgaaagtccttggaactctgcaaggtcccgaatcccgacactttccttggagggaacatctattaaataaaccagacaatgtaaagcatattcaaccccaacactgtactgcatataaactcacctgcttttgattttaaggtttatcacattgtatcttaggagtatttttgatgatagtcaatcttaaaacccttcttcagatactatttgttccgtttgacaaaataaaatacaaggtttatattagtgaccaagttaatcgtcgattaatatagtctttaatataaaatgaaaggagagtttcaaatgagcaaaacacttatcattaacgcacatccaaaagtagatgatacgtcatcatacagtctacgggtaatgaaccactttttagaggcttacaaagaattaattccagagagtgaagagcttgagcaaattaacttatatagtgatgatgtgcctatgattgataaaacagttttaagtgcatgggataaggcagaaaaatgcgaagaactgacaagcgatgaacaaaaagtaacaggacgcatgacagaagtattgaaacaattcaaaagtgcaaaaacgtatgtcattgttttgcctttgcataatttcaatattccatcaaaattaaaagactatatggacaatattatgatcgcacgtgaaacatttagatatactgacactgggtcagtaggtctgcttaaagatggacgaagaatgcttgtcatacaagctagcggatcaatttatacaaatgatgactggtatgaagaagttgaatactcaaataaatatctgaaatcaatgttcaatttcctcggtattgaggattatcaaattatccgagtgcaaggaacagctttactgagtccggaggatgttttacaaaaagcaaataaagaagttgaagaagctgcttcaagattggcaggtaaataaggtatagcatgaagatcattgttgctgggggactgcagtaattggtcggtcccttcttcctaaattaatacaaaacggccatcaagtatttgcattgacccgaggtaaccggtcgaacacgttcctcaaaagaataggggtaactcctgtaaaagcagatgcaatggatcgagatgctgttcttaatgcttttaggaaaatttaacctgaggttgttgtccatcagtttacctctttaacaggttacaatcttgaagaaaaagcgagaatcagaattataggtgcgcgaaatactgttgatgcgtgtcatgaaattggagtgaagaggataattgctcaaagtctttcttttgcttatgaacccggattaatacctgccaatgaagacgtccctttagatctcgacgcaccaaatccaaggaaaataaatgtaattggagtggcatcattagaatcagcagttgctgaattacccgatttagtaaacaacattaaaacattgcaagaaaatgggttgaacaatatctcatttgaagtaaatcatgacacgttagagcatctttccagcgtgtttttttatttgtgaaaatgaaaaacctgtcaagaaacaaaagacatacaataatcgcaataaaaacgaaaagaataatttaatcaatagacactttgtacctttttacattttaactttgtcaataaatgttcaatctgccatgtaaattttcaaaattctttacgggagtgggggaatttgcttgcaacaagttttcttgaacaaaggtaacgcccacaaccccgtaaactggcacccttggggagaagaagccttcgaaacccaagtattaaaaaggagaactgcttatgactctattttcagggttaaatgtcatctgctttattgctttttagataagaaataaggatttaaaatctttatctttttatttactgttagataggtgaaacacaccccggcgactgtaaccatcccgcctgtcagtgcaataaacgcaggtacttcacctaaccacacccaagaaatagccaaggctacggctggtgttaaataaagtgaaatggctgcttctgaagcaccgacgagtgaagtgacatacgcaagtgcaaagtaaggcacaaccgttggtaataagcctaagtaaacgacagaccatgtggaattcatcgatgcgtgaacaacttctccccataaccccggaagaaataccagcattggcaatgtcccgccccaaatagtgaatgtaacgaatgggataaatccatatttttttatatagcgggcttgaaaaacgaaataaatactctccgaaaaagctgccagcaagattaacaaaatgccgttcactgaatttgtatagtttcctgccccaaatgaaatgatcgatacacccaataaactaatgatagagccgacccatttataaaaaccgaaatgttcaccaaaaaacagacgggataacattgcagaaaaaataggtgtcatggtcacgagtaagcttgctacccctgcgctgacgtttttttctccgatattcagcaaaatgtgatatagtgcaaaacctaaaaatcctaacgataaaatagcagggatatccttcatgtcaggcaaacgcatatgagtcaaaacagcaaaaaccaccaatgccattgacccaatcaacaagcgaaacaaagcgaggtgttccggcgtgtaactctccaaactcgcgcgaattcccgggaaagctgatgcccacaacccaatcatcagactgtaagctatgccgattcgaactgttttctttctcatctttctcactcctctttacaaaaaccaaccagttatttaatgtttttctatattaataaagatttgatgagatgacttcaaccagttaaatagattttgacccaaccactttaaggaggacccttttaatgagcgctccagaagaaaaaaagatgagaaagcttcctaagtacatacaaatcattcaatttataaaagagaaaataggaaatggagaatggccgatcggaagtaagattccaagccagcgcacgcttgccaaacactttgaggtgaacaggagcacagtcattacagctttagaggaattgacggcggatggattaatcgaaggcagaatgggcaaagggacagttgttacgaacaatacatggacacttttggctaagaattccgctcccgattgggatcagtatgtaacctccggaattcagcagccaagccaaaaaatcgttcaagagatcaataaatcagaatcaaattctgatcttatacagctcagtaaaggagaactttcacatgagatttttcctttagctgttatgaaagagatcatgggaaaggtatcccaaaacatagaggcattcggatatgaggaaccaaaaggatatttgcctttgagagaggcattaagcggctatttaagaacaatcggcattcaagcttctccttcttccattcttattgtttcgggcgcactgcaagccttacagcttatatcaatggggcttttacaaaggggatcgaccgtttatcttgatcagccttcctatctttattcattacacgtatttcaatcagccggtatgaagctgactggagttcctatggatcatgatggacttttgccggaacatatccgcatggcaaggggagaacgggggagggctatcttatatacaaatccttgttttcataatccgacaggtattttaatgtcaaaaaagagacgagaagaaatccttgcggcaagtgagaatacacagcttcccattattgaagatgacatttatcgtgagttatggatagatgagattcccccggatcctattaaaacaatagataaaaatgggcatgtgctttacataggcagtttatcgaaaacattaagtccgggcttgaggattggctggattgtcgggccggaaccagtgattgaacgtttatccgacataaaaatgcaaacagattacggctccagttcgttatcccagagagtagcggcagagtggtttatatccggtgaataccagcagcatctagaacaggtgagaagtcaattaaaggtgagaagagaattggccttgagtgttttagaaactcatttgaaagatgtggcgacatggaatatcccaaagggaggattctttgtctgggtaaaaatattgccttccatatccgtgaaattactttataccaaagccttatcaaaagggattctgctcaatctcggcaggatctatgctgaggaaaaagggagttatattcgcttatcatatgcttatgcatctcttgaagaccttcaaaagggaatttatgaattgggtttgatgattaaggaattggcaagcagataaatttatcataattactttaatagaaagagacatgacaccaatgacacgcggattgttcgctgactacggttggggtgctggttaaaaaatacttaggagaacttgatattcaaagagctgtaagagagagattatctttaaaaccgtcactagcagaagtcttcaaaattatttaagttaatataccggtctttattgagatttgttttaaatatgcatttgaaggtcaattttatgatgactaagaactaagaattacactactttataaccgtaatttattaatgaaatatttcctgaaaaactttgatttttaattgcagattgatataataggtttgttattcttggccaaggatgagaatatttacaaatcttcaaaaagtggtgttagcaattaaaaaacctcatattttattatttatattaatttttacattaggtttttttgcgtgctttttattcatttttaagcatatagagagaaatgaaacagaaaaaattaatcataaccgtgtacaagaagtaccatggggagtgaaaaaaatcaatgctgcttcaatatggactttaagagagaaacagaaagtgaaagttgctatattagacagtggtattgataaagagcataaagatttaaaagggaaaattaaaggggaatttaatccaataaacatgactttaacctcagatgatgatgtggggcatggaactgctattgcaggcattatagcagctaaagataatagctttggattagttggaattgctccagacactgagatatattcagttaaagtactaaattcagaaggaaaaggttcgctagatacccttgttaaaggtatagagtggtgtattgataataatattcaggtaataaatttgagttttggattaaccaaagataaaccgttgttaagaggtgcaattgataaagcagtaaacagtgggatcataatcgttgcagccgcaggtaacaattatggcggggatgttgattatccagcagcttatgaaaaagttctctctattaatgctgtagatagaaataataaactagctaacttttcacctaaaggaaagattgacttttctgcacctggtgtagatataccgatactatccctcaataatggatataaaactgaaagtggtacatctttagcagctgcacatgttaccggagtaatatcattaattttacaaaatagagataaattcggaattgattcaaaagaggatatttataatcaagttaaccgtgtattgtccaaattgtccatcgatcttggaaagaaagggagagatgaaatttatggaaaaggatttttatcttttaagtaaaggggctaatttcaatgaaatgttttaaaaagagtattgctgtttttttaagtctaatattaacttttacttttattttacataatgaatcaaaagctgaggctataaacaataggtattaccaaattgtaacaaatgatgaagagaaattagtaatcacagcagaaaaaggcggagttaaaggtttaatgactttagataaagaaaatatgaaactttcattaataaccgatgaaacttctcagaagactggagaaaaaggtaaagaatataaagttgatattgaaaatgctacaaatgagaagatagaagcaacttttactgatacggaaacaaataaaaagtatgagattaattcagatgaggtaacagcttcttttgtttggtttatacctataggaatagttattggagaggcacttttagcgcatttaatttcaattggattagctgtgactatttcaggagtgacttatgttgcctattctgagtttaagaagcgtaaaagaacctattctcattatatggcagtaagaaagtctaaaggattatttatcggtaatggtttgaaaagacctgctgcaattgcacgccttaaaaggggtgatgacacttggtctacgtcgaagaacaatgccaaatctattgctaaagccgcaagtccgattaaaaaaattgttggtccggagatagataaaaagggtaaaggtaaacattatcattatcactcgatctctaggtataaacatggaaaaggtgtccgtatgaaagctcatgctttctatggggcagcaagataatttagattaatttataaacacctaactttaaagtaattaaaagataggaaattataataggagaaggaggtaactatgttaattattgatcacaacccaaaggatcagctgtattcagagttaattgatttggctttcgagatttgcgacgaatttcatttagttttaagaaaagatatgggatctttaaaatcattcgatcctctgttaaaaaaacttgaaagttcgttaaaagtaatgaaagagcaatcagaatgggccagtaccattctaggagacaatcaaaaagcaaaagtttattactattatacagatgaaaacgcaaaaaacattctgaaagaatccgcaaattctttatattcttgggagcagccacatttaccagaagacttgtctttttttaaagatggaaaggagtggttggtaacatgctctcatgaagaagaaagttatatcgatactgaagatgataaagaaatacaaagaatattgagtataccaggattaaaagtgcattttgaaagatgggattaaaatcattcaattttttataaaaaaattgaatgattttagtgaataatatatataagtaaggaaaccgtatagaatggtttccttacttattaaaccaacattactcaattgggatttttcttgtttatttcttgactaatacatattgtttatcttccaaatagaatatatgactaaggtgatttatatctttaaactttatatgttttccaaattgtaaagtatttaaattgataactacacccatgctttcatctttatcttcatcttcatatccatctaagcaggaatatatttcaattgattcaccttttgacaagtgtttttcaatgaaaagaaaaagtgatttaatagatttacgttggccaggtgtattgttggcatgtaagtacccttgtaattcatatatataaggatgtgtgaatttgtttctgactgcttcatatccaggatctaaatgaacaatatcaattccgtatgcatcttcttctgtgtcataaacctttacaagtgaattttcactgttctttcgattgtttttaaattgagagcgtttgttgacatctccttttatttttagttcagaaatgggcttaagtgtaggattactgccatactcaccaataggaagttctttatccgccccaataaaatgatgtaaagtcaatctatttcctcctttatcttatacaactaaaaatactcaatctgactttggataatgagatcttttttgtgtgtctatgataccccgtgtttcttgcctcatcaaggcttgataatgtttgaaggctgaagatggatgatgtgactgatttttaggctccttagggaaagaggaaccgaattaatttaatttaattgttatattgttgacgcatactccatcaatgtccatttagatggtatttttacagctgcagatttttcttcgactatttctaatgttctttcaagttgattatatatgtatccggaaaattaagtataccgtttgaccaatttcagcgttatgaagatttcgttgccagaataccaacaattgaagataaattgaagcagaatagtattaattctaaaaagtgcgggcgcattatggggagaggggaatcttacacacttatctgcagcttcacccacatactttgtgaaagctccaacagcttcttcgcattctgcaagacaacaactattccgttgctttttaacattttcacattacaggattcaggataaaaaagccgccaacagggcggcttttcttaagttaatataccaaatatatatcaaacttcaatctgtatagctatgtctttcctaaaaaaccatcggcttggttcttgaagagtaaatcatttaacccaaagcactattactcctgcagatgaaatttagattattgggctgtatagccgccatccattacgacggcctgccctgtaactccattagctttgtcactggcgaggaatactgcgtaatcagcgatttcttgcacggctaacaaacgtttttgaggaaccaaggggtaaatgacttcttcaaacaccttttctatagaaatgcctctagtctctgcaatatcttgtaactggttttgtaccaatggagtgtcgatatatcccggacacaaggcattgacagtaattccgtattccgctccttctaatgctgatactttagttaaaccgatcaaaccgtgtttagcgctgcaataagctgctttccctgcaaaaccaattaaaccatttatggaagccatattgatgatgcggccaaatttttgttttttcatcaaagggaacgctctttttgtcgcactaaaaggagcagtaatcattaatttcagcataaattcaaatttatcagtcgggaagttttctatatcagacacatgctgaatccccgcattgtttaccagaatatccattcgcccaaaggtttcaagtgtcttagagaaacttttttcaacttgttcttcgtttgttacatcacaaaccgcaggcaggacttcatatccttgtcccttaagttcctcagctgcatgatgcacggctttttcgttcaaatcggaaattaccacttttgcgccttctttagcgaattcacgtgcaatttctaaaccaattccgctagccgcgcctgtcacaagagcaactttactttctaataatttactcatagtaacccctccaggaaacattttggtctcctaaaagtttacacccggcagttgtataagtaaaatgaataaaaagaatataatgtattcgttaaactcatgaaatggagatcatacgatggatatacgccaaatcacatactttcttgaagttgctaaatccaacagttttactaaggcatcagaaaatctgcatttgtcacagcctgccttaagtaagatggttaaaagtttggaagaggaattaaaggttgatctcattgatcgatccgctagacaaatcgctttgacagatgcgggcgaaattgtatttgagcaaggccaaatgattatgaagtcattagatgacttgtcgacgaacttatacgatcttttgcatttaaaaaaaggaaaagtgaaaattggaataccgccgctgatcggtgtcttgttttttcctaaaatcattagagggtttaaacaattgtatcctgatgtgaacatcaagctgatagaacatggaggaaacaaggtgaaaaaggaggttgaagatggagtactggatcttggcgtggttattgaaccagtggacaaagagcagtttgatatcattccattgcttaatgaagaactgatgctcttcgttcattccgctcacccgcttgttcataaagagattgtggaaatgcaagacttgaaaaatgaacctttcatcctgtttagtgaagacttttctcttcacgatcggattattcaggagtgtattagagccggttttcgtccaaatattgtttatgaaagttctcaatgggattttatcagcgaaatgattggagaagaactaggtatttccattttccctcagtcgatagtgaaaaagactgatcaaagtttagttaaggcaatctccattgtcaatccatccattccttggaaagtggcgattattttaaaaaaaggaaaatacgtttcacacgcagtacgcgaatttatccggtatatttcatctttttgtaagagtaattacgtagactaagatcactcatgaaaaaaatgaatggtttttatagtttttatgtattttacggttagagagggctgcgatatattatcttatgtcaggaaataagtacctttcaggaggaatttcaaatggatcaaagccgttaccagcaaggtttagacaaattaatggagtacactttaacaaacgatgataaaatttctacgcatttaaagatttctgaagacttgaaagatatcgctccagatgtaagtaagtacattatagaatttgcttacggagatatatattcacgaccgggattaaccaatcaacaacgtgcgcttgttaccatttcatcccttgtaacgcaaggaaccgagccgcagcttgaacttcatatcaatacagggcttacatccggattaacaccgactgagattgtagagagtatcacccaattggttccttatacaggcttcccgcgtgtacttaatgctctttcagtagctaagaaggtgtttgcacagcggcatgtagaaagccattgagaaataaagagcttgtatggaatgcgggatgaagtagtataaactcatcaatagaatatacacaaaacgacagcctataaggctgtttttaacacaaatgtctgacctcttttttgttttcggctgatcatatgtaaaagcgattatatgaatcgctttttgatacttagaaacatgctaaccttcgacctctttatcagtaagcacttttaaagcatttcttacttttaaggcgaagttgacaggtttatcaatcgcttcgaaatgaatatacatcagtctcggtttgtcaaacagccagtgattgtgtagagacgttacaatcagatcatgtttccgaagagcgctgataaatggattgatttctttttgcagaattacagtttctccgctgcaaagagcacggccgtcttttgtcattgattcaaatgaaaacatttgcggaatgagcaaaaatgatcttccgggccgtcccagtacaaccggttttatattcgttcgtgatctcattactgtacaaattccattttcaaacgtatgcatggttccgcccagaatatcgttgaattcgtcacaaagaccatgccgttcaatcatttccccgtcagtttttggtaccgcacgcacagttttagtagtcagaactcttagggcctctcttacttttcttgcaaaattgagaggtttgtcaattgattcaaaatgcataaacatcagacgcggtttatcaaacagccaatggttatgaacggcagttacgatgataccgaatttgcgcagttcactcattaatgggttcacttcttcttgcagtaaaacagtctcacctaaacataaggctctgccttccgagtccatgctctcaaatgaaaaggcctgaggaataaaaggaaatgcctcggctcttcttccgagtaccaccgggtgaatgttgcttcgaaatcttgtcgccgtacatacgccatttacgacactgggcgttgaattgagaattcttgcaaattctttgcagagtcgtgatggctccatactcgtttcttccacttcatatctcctcctgaaatcaatttaaacgtacttaatagtaaagatatgtgaagatagaaaaaatgtaacgcggcaggagtccataatagagagaatcagcttttttcaccatctcttcaactgttaattattaatagattttaatcggactatttaagatgtgataaaagccttccggatgtgtttgtccattcagtttacattgggtgatgcctttttcttttaccatgttttctcattcgcttatgattactttgcccaacccgtatttgcggtaaggcttcaggatgcagattcgttcgagcttgcctgtttggtttacgatgcggatccgtcctgtgccggcaggctgattctcatgataaaccaagacatgcccgcactgttccccaagcgtatcgaactgatcaaattcatcggattcaggtacttgctgttcctcaatgaatactgcttttctaatctcaagcgctgcttgtaaatcaatttctgttgtatcctcatgatcaaccaacccttttcacatattagtctggactgcacggcttgcttgtggtcttatagaagtaacgacgaaacatttatattgcaagtgcaacaaaaatatgaagggtttgaaaagatatgactgatattttgcgtgaaatcggcatgatcgcacgggcattggattccatcagcaatattgaatttaaagaattagacttaacaaaagggcagtatctctatcttgtgcgtatatgtgaaaacccgggagtgatacaggaaaaactggcggaaatgattaaagttgaccgaacaacagcggcgagagcgatcaaaaaactggaaatacaaggatttgttgaaaagcgtcctgatgatcaaaataaaaaaataaaaaaactgttcccgaccgaaaaagggagaaaggtttatccgttattgcaaagagaaggagagcactctgcggaagtagcactgtccggctttacgtctgaggaaaaagaaaccattttcagccttcttcagcgggtgagaaaaaatatagagcatgattgggaatatgtgaagaagggaaacaaaagagactattaatggatgataattccttttactgaatgattgcgttgtgaatgattaaagtcataaatggatacgttatctgtgaaatctccttcctcggttcctgcttcaactagccgataggcttatttttaacgaaaagtatcaattatggtatatttaaataagacaaaataattgaagcggggaatgatatgagtacaatcgaaaaacaaagacgtaagaaattcagagccaaatcaatcgtacgggtcatcatggtcatcatcggcggaattattgccgcgtatggactggaaaccgtactgattccgaatagtgtatctgacggcggtgtaaccgggctcagcattgtcggttcacagctgtttcatttgcctcttgggatcttgattgcggtgatcaatataccgtttgtctggttaggatataagcaaatcgggaaaggttttgcgtttctatcaattatcggtattgtctcacttgccgcgggcacgagttttttccaccacacgccggctatcattgagggagataccctgttaatcaccgttgtcggcgggattattctcggcttgggaatgggattggcattgcgcaacggcggcgccttagatggaattgatatgctggctgtgcttctgtcacggaaattgccgtttggcacgagcgatctcattttatttttaaacatttttgtgtttatttttgtttcttttgtattcgggctgcaaggcgcattgctttccgtcattgcttactacatcgcatccaaggtgatccatgtggttgaggaaggcttaagcggttctaaaacatttcagattatcaccaacgagcctgcattaatggtagagaccattcgtgaagaattgggccggagcgctacgtataaagaagcatacggcggtttttctcatgaaaaattcaaagaaatcacatgtgtcatcaaccgtttggaagaaaccaaactgaaggaaattattaatgacattgataatcaagcctttgtgacggtatatgatgtcgctgaagtaaaaggcagtaatttcagaaaaatccataatcattaagaaggagctgccgttcaccggcagctttttttaaaaaggagaaaacacttgcaaaaaaagaataacggatgtatattattgatatatcaaacattgactagtcaattaattgcgcaaaagaaagtagggatgggttttgacagcatgttgttcagaggaaggcgagattttgtatcagctccaatcactgcacaaagtgatcggcacgaagtttgaagcgtgcaccggaatcagccaatcccgccttgagcttctcgccgtgcttttttacgtcgatgagatcagccaaagcgatcttcagaaaaaggtgaatattgacggcgcagctgtgacaagacacttgaaacagcttgaagccaaagaaatggtcacaagaaggcggaagcctgaggacaaccgaattatacttgtccggcttactgatcaggggcgggagagaattgaggcttccaaaaaggagaaggagcgtttcataaaggaaatgcttgccggtgtcagcgaggaagaacgcagtatgttaaaaaacgtattgtcgcagatgcagaataatatagaaaatatgaaagcataggagtgtattacacatgaaaacagaactgaaaacaaacgattttatggacattatgaaaggccgccgttccattcggaattacgatccggctgtaaaaatcagcaaagaagaaatgactcaaatattggaagaagcaacgacagcgccgtcttcagttaacgcgcagccatggcgtttcctcgtcattgacagccctgaaggaaaagaaaaactcgcgccgcttgccagctttaaccaaacacaggtcagcacatcatctgcggtgatcgcggttttcgcagatatgaacagtgatgactatttagaagaaatttattcaaaagcggtcgagctgggctacatgccgcaggaagtaaaagacagacaaatcgctgcgttgacggcgcattttgaaaaactgccggagcaagtgaaccgtgaaacgattctgatcgacggaggtcttgtttccatgcagctgatgcttacggcacgcgcgcacggctatgatacaaacccgatcggcggctatgataaagaaaagattgccgaggttttcggaatggataaagagcgttatgtaccggtcatgctgttatcaatcggaaaagcggcagacgaaggatatgcttcctaccgtcttcctatcgaaacaatcgcacaatggaaataaggttgaagtgaagctgagaggagagggacagtggacataattgcggctgttttcgtcggaattgtagctttagaacatatatttatcatgatacttgaaatgttttttatcaattcgaaggctgccaagcggtctttcaaattgccgaagcatttagaaggcgatcggaatgtggcggtcatgtttgcaaatcaaggtctgtataatggatttctggctgccggcctcatttggggactgatcctcggagctgatccgattggccatatgattcaaatgtttttcgtcatctgtgtggtcatcgcggccattttcggaggctttacttcaaacaaatcaattatcgtaaaacaaggacttccggctgttttagcgcttatttttcttttattggcgtagcagacggagtgagtgagggcttccggaaaggaagccctctttttttattctgttttgaaaatcatttcttatatacatcactatagattggggatgtcaaatcagctgtcaccccttcttaattgttatttgctgaaagtcttctatctgctaataaagcctaatagatggagtggactccatgtcaatctgtttttttaaaaaaagctgatcggtaaatatggtatgatttacataatcagggagtggggttgcagaggatgaatatgaagagagcgtattacgctattttatacagccagaccgctatcaacttggggttttcactttatacgatggccgtcatcttgtttttgtttacaaaaaccggttcgacggcgatggcctctcttatgacgctcgtcagcattgtatgccgcgtattgggcagcgccgttttgccgctggtcaccggtcggttcacgcttcgttctttgttaatcagttctcaattgatacagatcacactgttagtctgtttgttttttgtcatccaaaccggttcatccgcattcttttttctgctgttttgtctgatcggaggcatttctttttgcaacggatggtttgctccgataaaaagcgcgctgattggggaaatcattcctcctgatcgaagggcgaaagcgaacagtttattatcggcggcggatcagaccgttcagtttgcggggtggtctctgggcggcgtcatcatagcgttcctgggagagagcgatacaatgatcgtcactgtcatgttattggtttcttcggtgttgggcatcattctgtttcttcaagtacgcatgtgtgcgccggcagcagtcagggaacgttccctttttgcagatgcggcaagcggctgggtgtatttatttcagcaaaaacagctcaaggttctcattgtgatggatgtgatcgaatcgtgggcaggcatgatatggatcgggtctgtgtccttaacttatgtgcatgacgtccttcataaaggagaggcttggtgggggtatgtcaacggagtctattatgcagggacgatgatcggcggactgatcatctataagttatccggtaagcttcagcatcatctcattccgcttatgctgacgggagccttggcatatggaatgttcacgtttatttacgggctgatcacaagcgccgttacggccctttttctggtgctgtgtatggggccggcttgtgtattacgagatctcacgcaggaaacattacttcaaaatatcacgaccgaaaagacacgggtcaatatattagcggcgagatcagctttagttcagttcatttttatgttttccattatcggaacggggattatctcggatgtattcggcgtgcggtttatttatattggcgcaggccttctcttattaatttcggcttttatcggattttctcagctgcgaatgaagaaaatggtacagagcggcatgtagtgtagtataattaggaacgtacgttctatatcgagagaggagagggtaatgtgggacatctggcactgcaattgtatgattatcatctttgggcaaatcagcaaatattcacccggcttaaagagcttccggaggatgtgtaccgtaaggagattcaaagtgtctttccgtcgatagccggtgtattgactcatgtgtatctgtcggataaggggtggtttgatgtgttctccggagagcgtctggaggatacgctgaaatcagctgaacagcaaaaagaggacatcttgtctaaagagatagaagagctggaagatctatttttgaaattatcagaccggtatcaactatttttgcagaaggaggaaaatatcagcctcccccttgaaatagagcatccgtcaggtgacatcatgaaaaccgcagcggccgatatgatcctccatgttgtgaaccacggaacgtatcatcgcgggaatataacagccatgctcagacagatggggtatgcttctgtgccgacggattacggtatttatttatatataaacaaaaagtaaacaagacaggcaacgcggctgtcttgtgatatccgtaaaaaagccaaatcatatgagtgatttggctttttcgtttgctatgccatgttttgcagccgttctaaactgtttttccaattcgcttcaagcgctgtaaaagcagcggcggcatcttgctgttctaatgcgtgaatgatatcagagtgttcattatatgatctgtttaaagcgccgttttcactgaaatagcggatttccagtctctgaattttgactttcaggcttactagcaatttgtgaagttcagcgttgtccgcaagcagaatgatgcgatggtgaaatgcattatccgcttccagaacggccattttatcgccgtctttcatcgtttgaagaagattttcattcagctgtttcaattcttgaatcacggcatcgtccatacgcgggagggcttgctgcaatgcgagtttctcaagcgtccagacgatggaatacaagttttccgcttcttttaactcaatcggagcgacaagtgtccatctgttcgcttttgttatcaccaagccgtcatcttccagccgcaataaggcttcccgtatcggggtgcggctgattcccaatgtttccgacaaatccttgtcctttaactttgtttccggtttgagcttgcccgttatgatccagtttctgagtgtgcgatacacttcgtcccgcatgatggttcttttcagcacaggttctttgttttgattatccaatggaacacctcatgaatcgtagtatacatatttgcattttaccacagtccgggcgccggttagaaatgaagagggacgtctaagaatgaatcgaaccgagatgcttcatctcaatatgctgaaagtcagcggagccgccttcagaaaagagcgtgattccctgatcttcgtgttttgggaacacttcatttgtcaaaacggtttttccgtcgtctgcaaatacttcaatacttgttttatccacgagaattttcagatgaacgcgccctttgtttccgtcaaatggggctttgctttcggtgtatgcaccggttttatcaggctggtctgtaaacgatctgttcacataggcacaaccgtcttctgctgaaataccgacatcaatatgccggctttggtctgctgattctctgagtctgacgcctgcatttttgatatctgaccaagcgatatccatatcaagctgatatgtatcacctttgatcggcagtgtctctgaaccgttcacctgtttgtgttctatgctgtcagttgaagaagttaattggttcaatgcttcaaccggctctgacacaaggctgtatgtgccgccgtcctgctgctgaagacggatttcacggacgatagaatccgtgccgttaaagccgttttttagtgtcggtgtttcattcggataatcccaattgttcatccatgccagcgcatagcgttttgtcagcggatcttcgctattaccgtcttcaaatgtgacgccgccgtaccagtcaaagccgtaatcaagccattgcggttcttcttgatcggcggtaaattccttcccgtcaaagtttccggtccaatacgcgtacgtattcggtttgcctgcgggtttgccgtttgcgcttgcgcccagaacccacttggctgtgccgtcatctgcacgcatcatataaaggtcggggcattcgatgaggccgatctgctgagtgataaaaccgcccgtgtatttccaattttttaaatcgggtgattcataaaaaccgattttttctccttcggccatggccatcacccatttgtcatcctgttcatcccagatcactttcgggtcccggaaatccttagttcccgggtttttcataacgggctgatcactataggaagtaaacgtttttcctttatccgtgctgtaccataaatattgttcctgggcttttgttttggctgtcggctgcgttgtgacggcgaccagcgcgtttttgccgaagcccgcggtgttgtgtttatcaatgacgacagaaccggaccagatatcgccgttttcgttggtgtatttcggaatagccgtgccttcgtccgtccagtgcaccaagtcctttgatacggcgtgccgccattctgtgccgttgccgttcgggtaatcccgattataaagatagtagtaatgatatttcccctcgaaaaaaataggcttttgagggtcgtttttccatttgtccggagtcgtaaaatgatacgccgcccggtaatccttcttatgctccgtgttgtttgtgtcagaggaattgtggtttttgttcggcagtaagccgacaaacaggaacgcacccaaaaagatcaatattacaacgggccattttcgtgccatgattgaattcaccatcttattgagaaataaaagaaaatgccaatgaagtatcggcattttctttttgttgttattagttgttaaccgtaagctgtccttgttcaaggatgctgtttttaacaacggatgttttcttgcctttgatgttcattaagaagcttggcgcaaatgtcgcctttttatcctcaaagaagcctctgtttgtcatgtagcttgtgatcacgacattgttgcctttggcttgcggcactgcgaagtgagagtaagtgaacgttacgtcgttaggatcaagacccatttgcaggacaagaccagttttgttcagcggcttgtaaggacctgttaaagagtttgatacataaccaagcatgtaaatatcgtttgagttaataccgtcgatcgtcatttttgaaccgcgtgaatcagtgaacaggtaccatttgccgttcattttgaaaacattcgcgcgctcgatttcatcagttaccgtgtttgaagtgatcagcggcttcatgacttttttcaatgtgtaatcatcgtttaactctaccataccgagggcgccgttcgctaattcagcatcgcgttttttagcgctttgctgaagcttctgactttctttacggaagaagtttgtgctgccgccgtagtacgctttgttaaataaagattcttcgccttggtatccgttttctgttcccgtgttggcttcgaatacaaggtatttatgtcctttgtcttcaacgtagtgagggtctctcagcgtatggttgtcgccggatgtatagttcccttcatcgataaactgctgaacgttttgatatgtttttccgtcgccgtcaaaaatcgttttatgatcttcaactccgttgatcttgagcgtgtcatcagattttgacacatttacctgcgccgttgtcaggctttgtttgccgtaatgtttaccggaaaagtcagtgtagaataaacggatttttccgtcagatgtaaaggttgcagaaccggaccattcttgtgtctgttctttcaggatttcatcgttggcgtcgaacttatcgctgtctttaaagacacggcccgcgtttttccagctgtcgatcgagttgtcgccgactttttgataaaacatgtagatggatgtgtcatcagcgtctttcgggcttccggcaagagcaaacacgacgtgatagccgttgtattcagctactgttccgtcagcgttttggagcggccagctgtcccacacatccagtcctttcgcggactcgatatttttaattgttgatgggtcgaattgaggcacttggtatttttcactttgctgctgtttagggatctgcagcatatcatggcgtgtgatatgagagacgccgtacgtttctttgtaaggtttttgggtattttctttcgcgaaggcttgagtcgctcccctgccagaagtgcagtcgtaaaagttagaactgtggctcgttttgcaaattttttgatgttcatgttcatgtctccttttgtatgtacctttttttgcgatctgccgattcgatcctcctgcattcatggatgacaggtttgttacagaaaaaaagacctaaaatatgtatggggtgacgccaaagaatacactttgcccttaacacattttaggtcttgcctgctttatcagtaacaatcctgcatgatttacttgtcgacatcattctattagactctgattctattgacaactggtctattttcctcttttggatgatagtaaaatgaaaaaaggccttttaatatatgggtaattgagcctaaggggtgctctggccctaggaaaaaacctctctaaaaaagagaggttattttttcttgatagataataaagcgatggtggttaaaatcagcaaagtacccagccattctgatattccgaagggaacatgcagccagataacagttaaaaaagctgccgacagcggctctgcacaggcgagcaggctggtttcagaggcactcagatatttcaggctttccaagtagcaataaaaagcgatgagcgttccgaaaatgatgataaacacaatcgcggcatatgcaggaaaggaccactcgccttcaaatgtccagggcgggcggatcaagctgagggcggctccgccgatcagcatgccccatcctacaacaatggcggatccccatttcttcagcagacgatgcggctgaagggtgtaaaacgccagtgcaaacgccgaactgattccccaaaagacggccagaccggatatggacaggcttccgacattcccgtgcgtgaccaaaatgaatgtgccggcaaccgccaataagacggcgagcagctcttttcctgaaggaattctctttgcgcgaatcgctaaaaagcatgtaatgatcgccggtcctaaatactgaagaacggtagctgttgccgcgttgccatgctcaattgccgcgaagtaggtgtattgaacacctaacattccgaaaatcccgaataaaagaaggggaattctgtcccgtctgtctttccaaacagcccatatccgtcctttttctttgcggtacgcgattccgagcagaagcgcccctgacaccagaaggcgcaccgaagtcagccattctgtattaaaatggcggtgctggaacagatactgggcaaccgttcccgagacccccataagatagctcctgtaagcacaagccaaatgcctgttgttcgtgaataagaaagagcagcgtgtttttccaggatagacacccccgattctgatgttgcgacagcaacttacaataattagaaaaatgaacgccttacatgtgatatattatatattgtatattaataggcgtcaaaataattttagagtaagcgcttacgaaacggccgtctgatgaacgagctgtaaaaaaaacaccccggctggttgccggggtgttttggttattctgcaatcgcgtctgttaaaacaggaacgacttgtttctttctggatacgacgccttttaaaagggccgtgttgttttctaacgtcacgttgaatgctttttccacttttgacgcttgatcaccgatggcaagcgcaagggaatcattttccagaatatccgtaatcacgagaaggaacaggtcaaggttcttctcggcaattacttttgaaagagccgcttctaattccggctgccgctttttgacatcttcaatatcaactgtgttgacttgggcgatttcgacttttttgctgccgagcgtgaactctttcgcatcaagagaaatcagttcttccacagtttttttgcttaagtcggcgcccgctttcagcatgtttaagccgtactcttccgcatctacgccggcaatttcagcaagctcttttgccgctgcgatatcttgctccgtgcaagtcggagatttaaataacagagagtcggaaatgattgctgacagcatgaggcccgcaatttctttctcgattttcacgttattttctttgtacattttgtttaagatcgtagccgtacagccgaccggctcagcacggtagtaaagaggttccgctgtttcgaagttggcgatacggtggtggtcgatcacttcaagaacctgaacgtcttcgatatctttgatgctttgctggcgttcattgtggtcaacaaggatgacgccgtttacttcgtttgcggctgtttccaccaaacgcgggctttcctgcttgaaataatcaagcgcgtattgtgtttcgccgttgacttgtccaaggcggacgggctcagcattgaagccgagtttattttttagatcagcgtaggcaatggcagagcaaatggtatctgtgtctgggttttgatgtccgaaaataagaattttttccataataactccttgtccttttttgtagtgtaaacaatctttttatagtttaacacgtcttgcggagggtgtaatcttcaaaaccttaaaaattgatgtgaaaaagaagcatttttgttgagcggtgaggaggattgcgagtaaaatactgggtaagtcagatgctaatcagcatatagtatcaaaaaaggtactatggaggatgaaaaatgaacatatatccgaataaagaaggttgtccggttgaactgacgctttccgttatcggcggaaagtggaagggtattttgttttatcatatgatcggcggaaaaaagcggtttaatgagtttcggcgcatttgccccagcattacgcagcgtatgctgacgcttcagcttcgcgagcttgaggcggacggcatcgtgcatcgcgaggtatatcagcaggtgcctccaaaggtggagtattctcttaccgaattcggcaggtcgctggaaccgatcgttttgcaaatgaagaaatggggagatgccaaccgggagtttctcgagacataccgggaaaaaacgtcgcctcaagatcagtccgctcaaaaataagaagcagcaaaggattaaattccttgctgcttttttttatttcatcgcgatggcttttctggcgttgcgcacatcattcttcagcaattcgctcaggttgtaagccggatattgaccgcgttcttccatatactcaaagaccatttgatgccacttgatggccgcgtttaagtgcttgacgaaaacgtgtctcaattggggtgtggccgtctctgtaatggctccggcgtaattgcgcacagacgttttggccatgctcagcagaccgccgctgtaaaacgcggaatcagcgcgctcttctgtttcatcctcacgaaaagcgggagcttcagggaagaaaggaagcagttcacgcagattttgttccagcgaatggatggaaaatcggtaaagctgttttaatctggcatcgcttacgtcccgctctgttctttttaatttcacaagtccgtttgcctggaaagccactaactcatgcagttctaacgtttcatgccatgctaatgttctccgctcggtcatagtgtaagaatctcctttatccttcattttcactttcagcatatgccccggtcccgatgttgttcctgatgttttgaagtttccagaaagggaaactcaatgtaaaggaaatacgaaatagaggtgaaactatatgtgggacatgataaagaacttcttccttttcagcagcggggttttacaggcgaccactctcttacttatcgttatcgtcttgttatatgtacgaaaaaccaaaaagaaaaacagagaaacttctggttttatggatgatcaggatcactgatacaacgggcattctttcacggggatgtccgtttgtctgttttcatgtttcacatggaacattgcggctgtccgcgctcattttacttgcgatttcgacttatgttaaaatatatacgtgtattttggagagtttatggaaaattcaggtcttgaaagagacattgcggcgtcaaaagagcagtcgtctaagctgctcttttctattcgtatgttcgaatgatacaaggtttgaggtgagtaagtgaaaaatacaagggctctaatagaaggcgccattttgatcagtatttttgcaatcatttcccttttggtcgtgtacctccctttactgggggcaattcttctctttgctttgccgctgccgatcattctttacaccattcggcacggtctgaagcccggggtatggatggggcttgccagccttcctgtcagctttattgtaggttcgtttaccgggcttacaggcgcttttacggcggcctgtacgggaatcgccatgggatattattttaaaaagaaacagcccggctatgcggttgctgccggcgctatggcgtatgtgctgtgcggcgtcgttttttttgtggtcagcatcgtgtttcttaatatgaatgtgatcgataccaccatgtcccagcttcgggagtcgatgtctttagcagaaaccatgtcaaagcagctcggttacggagatcagttcgggaagcagatcaagctgatggaaagtcagctgagcacggttcaatatctttttccgacagtgctcgtattgaccggcatcgttttttctttcctcagttatgctatggcaaggccgcttttacggcgattttcccctgatcttccgaagatgaagccttttagagagctcaaactcccgcaaagcgttgtcattctgtattttattgtgacgatattagggtttctgcctttagaaaaagggcatatgctgtattcggtttcattgaatgggggatttattctcagcttgctgatttgtattcaagggttagcgtttatttttttctattgccgcgaaatggagatgccgaaagccgttcctgttttagcaattgtgctgggtgtgctttttccgctcatcttgtccgtgtatctcctcttaggcatcattgacataggctttaacataagaaataaggtgacgcgaaattgagtgtgacttacaggtggggagttgatagaaatgcctagtttttatgaaaaaccgttgtttcggtatcccatctatgcattgattgcattgtcaatcatcataatcctcatcagcatttactttaactggctgataggagccatcggcgttgtgctgctcgccgtgatcctgtttttcattaagcgtgcggattctctgatcagaaaagaaattgacgattatatctccacgttatcgtatagattgaaaaaagtaggcgaagaggcattaatggaaatgcctatcgggattatgctgtttaatgatcaatattacattgagtgggcgaatccgtttttgtcttcctgttttaatgaaagtacgctcgtcgggcgctcgctgtatgacacatgcgaggccgtcgtgccgctgatcaagcaggaggtcgattcggaaacgatcaccttgaatgagcggaagtttaaagtagtgattaaaagagatgagcggctgctctatttctttgatgtgacagaacagattcagattgaaaagcagtatgaaaatgagagaaccgtgctggcatatatctttttagataactatgatgacgtcacacaggggctggatgaccaaacgagaagcacgatgaacagccaggtcacctcattattaaatgcgtgggcgcaggagtacggcattttcctgaaacggacgtcctcggagcggtttatcgcggtgttaaatgaacacattttaacggagcttgaaaacgcgaaattttcgattttggatgaaatccgtgaaaaaacatccgttcacactgtatctttgaccctcagcatcgggatcggcgcatcggtttcttccttgaaggagcttggagatctggcgcagtccagcctcgatttggctctcggccgcggaggcgaccaagtggccatcaaaatgccgaacggcaaggtgaaattttacggcggcaaaacaaatccgatggagaaacgcacaagggtgcgcgcccgggtgatttctcacgcgctcaaggagattgtctcagaaagcagcaatgtcattatcatggggcacaaatttcctgatatggacgcagtcggagccgcaatcggaatattgaaggtggcgcaggccaacggcaaagaaggctacatcgtcattgatccgaaccagatcggatcaagcgttcagcgcctgattgaagaaattaaaaaatatgaagagctgtggtcgcggttcatcacaccggaagaggcgatggagatttcaaatgacgacacgctgcttgtcgtcgttgatacacataaaccgtcccttgtgatggaagagcgtctcatgaacaaaatcgagcacatcgttgtgattgaccaccaccgcagaggcgaggaatttattaaagacccgctgctcgtttatatggagccatacgcttcatccaccgcagaactcgtgacggagctgcttgaataccagccgaagcggctcaaaatcaatatgattgaagcgacggccctgttagctggtataatagtggatacgaagagtttttcccttcgcacgggctcgcggacgttcgacgccgcttcttatttgagagcgaaaggcgcagatacggttctggtgcagaaagttctcaaagaatccgtcggttcttatatcaagcgggcgaaactgatccagcatacagctctttataaagaacatatcgcgattgcttctcttcctgagaacgaagaggagtactttgaccaggtgctgattgcgcaggcggctgattccctcttatcgatgagtgaagtggaagcttcatttgcggtagccagacgggatgagcatacggtgtgcatcagtgcgagatcgctgggcgaggtcaatgtgcagattattatggaggcgctggatggcggagggcatttaaccaatgcggcaacccagttatcgggcatttctgtctcagaagcgctcgtccggctgaaggaagccattgatgaatattttgagggaggcgttcagagatgaaggttattttcttacaagatgtaaaaggtaaaggaaaaaaaggcgaaatgaaaaacgtagcagacggttatgcacataactttctcattaaaaaaggcctcgctgtcgaagcaaatgcgacaaacatcagcgcattgaaaggacagaaagaaaaagagaaaaaagaagcgattgccgagcttgaaagagcgaaagatttgaaagaaacgcttgaacagctgactgttgagctgagtgccaaatccggtgaaggcggccgccttttcgggtctgtcacaagcaagcagattgcagaagcgctgcaaaaaacgcataagattaaagtggataaacggaaactggagctccaagacggtatccgcacactgggatatacaaacgttcctgtaaagctgcaccctgaagttcaggctgtgctgaaggttcacgtaaaagaagaagcgtaatacacaatgaaaaacccgccgatccggcgggtttttttcatgtcagcagacggcgcagcgcaagaaaatgatgagattgtttcatttccgatcgttaccagattgcatattatattacatcataacgaaggatgtgtcggtatgaaacgatttttttctgaaacatattttaataatccggagaataaaaaggcgctggagcattatccgctgatcggagacggaaaagacggggaagtctaccgcttaacacacaacaaatgcataaaatacttctttgaaaaagggacatgcaagaaggaattggcggctttaaagaccggacaaggttccccggtgattccaagactgtatgaatacggagatcgttatattgtgatggaatacgtccaaggcacctctcttgcccgccatatcagaaaagaaaaatccctgtccgtcaaaatgactgctgatattttaaatatgctggatgaattaaaaagaatcggttttaccagatgggatgccgaaatcaggcacattctgatcaatgaacacggaaatcttaaagtcatcgaccataaaagagctttttccgctattacccggtttcccgtaaaactattaaaaggactggacaaatacggcttggcggatgagtttttgaatactataaaaaaattaaatccgtcacgttacctggaatggcagccgcacatgtaagtttctgaaaatccgcacatgtaagtttcctttttttagggtcgtcatatgatatttgtaacatttgtttggtggagtgtggaaaaaatggcagaatacattatggttatcggcgctcatcccgatgatgaactattgggagcagcgggcaccataaaacggctgatcaatgaaggatataaagtgatttccattattacggcattaggaagaaaagaagaagctcatcatattaaacaattaggcgaacgcgcgaatcaagagcttggaattgagaaagtcatctttttggagcatacgaatttagagctggaatgtatccctcttcataagcttgtcaaagaattagagcagctcattcgcgtctatcagcctgataaaatctttacacatcattacggcgatatcaatatggaccaccagagaacattccaagcagttttaacagccgccagaccgcttccgaatcaaaaacctatcgaactgcttacgttcgaaacgctatcttcaagcgagtgggagaggaatacggctgataaactcttcaaacctaattacttcgttaacatcacagacacaatggatgctaaactcgcggcgcttcaccactatgacgtagaaatgagggattaccctcatccccgttcatatgaaggcgttaaacatttaggaaaagtcagagggatgacggcgggtgtggaatacgccgaagcttttgaagtcgtgcggaggatctggaaatgatcaagacattttccgtcccgtatccgtatatggtccagacgcttgaccgctactacggggtcaaaacgcgccctcaaaaaaaggcggcagtaaagacacagttgaaacatgaacatcatattccgcggttatacaggaaaaaaaagaagttatccattttgattgccacgttttgggactacccgcacacgggcggtttatcaaactatattaaaacgcttagtgaaggcctgaagaagaggggtcataaggtggatgtcatctcccctaatctgtttccgtccgcacaggtaaaagaactgcgggcggctgttgttccgaagttaaaagatttctttaaggacagatatggggattataacaatcatattttgaaaaataatcggctgatgtttatatacgagcaaatgcttcaaaagattcatttggaaagatatgatgtgtttcatgctcaagatttatttacagccaatatattaggcagattcaatcaaatctataagaaacctttatttttcacaccgcatggcatgtttactttcaacagacttaaatttcacatctttaaaaaaggatcgatagaagagttttattataaaaaactagagatgaaagccattgaatacgcagatcgcctgattattatcagcgatacgttccgcagcccgctcatgaagctcggagccgaacaggaagacatgacaacggtgatcacaggaatcgattacgatgcaaaaacaggcgggaaaagaaaaatcccgctgccgaaaaataagatcatcatctcgtgtattgcaagattaggcccgagaaaaggacataatcatttgcttgacgcactttcacgaattccgtctgatgtacttgagcatgttgaagtgctgatcgcgggcgacggagagatgaggagcgccttagaggaacaggctcgaaaactgaatctatctatggtttcctttttaggaaaaagagatgatgttcccgctattttgaatatgacggacatattcgtactgccgaccgttaatgacagtctgcctatttcgattattgaagcgatgttcagcggctcggctatcatcgcgaccgattgcgggggtattccggatctgatccgccataacaaaacggggcttattgtcgagccgggaaatgcaaaggttcttgcccgggctttagcgttttttatcactaacaaatctgcgcggaagatagctgcttcaaacgcaaaggcctacgcggagaaatatttgagcagtgagacgatgataaaaaatatcgaatcgatttatcaaaataccaacagctcggagggagatcatgaaacatgaacatgcagccgttgtactagatttcagtgcaaacgggattgggatcattcgcagcctggcccgaagaggaatcgatgtttacgcatttgacacggagggaccttatcgtatcggaaaatcaagattggcagattgcgggatatgtcccagccctttaacacaagaggaagaactgctgacattcctgactgatttcgggaagcgattccaagcaaagccggttctgtatgcaggttctgatgattatgcgggatttatatctaaattccgcgagacattagccggtttttttttatttttgctcccgagccgctctctgttagaaacggtcttagataaaagcaaagcatatgaattagcggtcaagcataacatcccctgcccgaaaaccttttttccgaacaaccgggatgagctggaagaggccatcgccaatattgacttcccgtgtattttaaaaccggtggccggccatgaatacagaaaaaaagtaaacaaaaaagcaattgtaatgaaggatgccgcacaattgcgcaaggagttcagctcctacagagaaaatggagaactgctcgtgcaggagatcatccccggagacaaccagtgtttttataaagtcgccactttttatgatgaccaaatgaaattaatgggcttattctctctgcaaaagaaccatcaattccctgctgattttggcgcgggggcccacgtcgtcagcaaacggcttcctgatttaatcgagaagaccctgccgttttttgaagcgattcagctgaagggagtaggcatggcagaatttaaaaaggacccccgggacaatgtttataagtttatcgaaattaatccgcgcttttggctcagccatagcctgacagaaccggcaggcattcatttcgtttacatgtactatctgtatttgaccggacaacatgtgaagccccagctcgaacaaaaagacggaatcaactggatttatgaggtgcgttacttcttaacgtttttgaagaaacgaaaaagaggagaaatgacgttccgggatttttggaaaggatttaaaggaaaaaaagagtacgctctgtttgcttggaatgacccgatgccatttatcagaaacacttggtctcatctcaaaaacagctggaaacggaagcggaaggaagatcggcatgtatgaaaaggatcttttgtatgacgcatttcaaaaactgagaattgacgaaaaactgtcgtattcgttcggtgaaagggccgcggtgaatccggatgacatcacatgcctgaaatcaacagacagaagcgccatttataaactgtttgtaaagaaaaaatccggaattgttccgctgatattgaaggtgtataaatcttcacgtgaaaaaaacaaggtcgagattaatatatacgggaaagcccgttctgttttaggggatttgctgccggacatctatcttatagaggaaagtgaccatgaaacgtggatatttatggagtttgtcagccagatcagaggacagcttacatttcatccgaagcatttcaagtatattattccgtctgtcgcagaactgcacagccgcacctttgaaaacaaggctgtttctgacggtaaatggcggtcgtggctgccgctatacgaatcggaaaccatgagaaaagggcgtaaaaagcagatcaaaaagacagcggaattattggatagagctcttaaagatgagcgcacaaaggatatcgtgaagcctcattatcggcaaatcacaaacttgctggagcaggaggagccgggttttttccctgaattggtccaaaacggctcagccatcacacacggtgatcttcatatgcagaatatctgcacccacgatgcgtccggacatgaaccgtgggatattcaattcatcgattgggaatccgcaaagtacgcgccggtttggtttgatatgacggtgctggtcgaaattctgctcggcttcagaaaagactggagccggcacgcagaagatattcggacgtattgcgtaaaagtgtatacgaaagaaatgaaaaagcggggcattcattttcagacccctcctatgacgctttataaaatggcttatttgcagagaacacttgagaaagggcttcatacccaattgcggagaatcttcgacaatcggggaggagaactgctgccgtatcatgttgacaaagtgtcaaaatggggacgggaattaggattataagtttaagagagggggagcggatttgaaaggagagatcggcaagccgaacggtctggtgcctctaaccttattgcgcgtcatggatcaattttacgggatcgaacatcaaagtgagccggagatgctgtattcgttctgtgcggaaggaaaaagctcccccaaacgaaaaaagccattgcgtattctgtacgcaacctttctccgttacccgaatgtcggaggactggcgagttatatcacgtcaattaagacgggttttgagcgcatcggtcaccaggcggatgtcatctcgccgctccaaatgccgccaactttttttcaggaagatatcccgcgggccgctgacgagatcagagcgtttcttgttggcagatacggggccgcaaacgaaaagtttgtgaagaatctcagctatttacatgtctttcaaagatttttgaaggagaaggacttagaacaatatgacctgtttcacgcgcaggatttatttgcggcatttttgctgggataccttaatcaaacgtatcggcatccgcttttttttacgccgcacggacatttcacgaaaagccggatgaagtttcataaaatccaaaagggttcaatagaagaggcatatttcagtgaaatagaaaggcagggtattcgggcttcggataaaatcattacaatcagcgactcctttcacgagcccttgctggagtacggagcgaaggaggctcagctgacgactgttcataccggcattgacatccgggttgcacccgagccaaaacgtgctgaaaaggtcgtgattgcgtgcgtttcccgtctgaccgagcgaaaaggacatgatgtgctgctggacgctctcgcccgcatccggcaccatttatccggagtggatatatggatcatcggggacggaaacatgagagggtttctggaagagaagagacggaaactgggcctctcaaacgtgtttttcctcggaaaacgacatgatgtgccggcgcttttggctgaatcatctatatttgtcctgccgacattgaatgataatttccccatagcgatcatcgaagcgatgttctcaggtcaagccattgtcgcaactgactgcggaggaatccctgagatgatccggcacgaggacacagggcttatctgtcagcccggcaacagccgcgaacttgctgatgccctcgtaaagctgattacggatcagtctctcagggaacggcttggaaaagaagcgcgctcctatgccggccggcatctgcgtcaggaactgatggtttcaaaaatagaaaggatttatcaatcatttttctgaatgataccggcgccgcatggcaggtgcttcaagagcaaaataaagaggccggtgtttaactatccagcctctttccgagctgttttttcatctcatacagagtctgctgactttgtccgcccgggccgcctgtcattcctcatcgggctgagcctgtttttccggtgctgtatcggtcagctgagatttttgtgccgttctttttaatccatgagacaagctttgtgttgcctgaattgtttccggataataagaaatagttcacttttccttcgtcaacaagttttttcagctgtgagacggttttaccgaaattttcttcatggaaaaaagaggcggaaagccatcgcttccgcctcccgcacatatatatgagagagcagcctttatttgtgatcgttctctttttggatttcagctaatttggcaagcagaatgtgctgaggcatgtgcatgattctctcaagcggcatattcagtgattctgcgagcttttgcgccgtttcggcggaaatttgcagcggtttcatgtgatcactccttccgtttctttattgtactaaaatcagaaatctatcgtaagaggatatgacaaaggaatggaggtttgaaaagcggggctttataacagaatgggggaggttttttatgcaatcgccattgatgttattacagctgaagctggctgattatcagaaaaaagccgcagaactgcggacaattgacgaatttatcatactgaaacagacattgcaggacatgatgaaagtattcgccgcctttgaagaatgggagctgtatcaaaaaacggccgatctcatggcgcagacggtgctgcacatccgtttcatcgaataagaaaagccctcgcacgggcgaaggcttttcttaaaaggaacgttcctcttcaatgtttttatgctgatcataaatgacaagcttagccgggctgttctctttcgccatctgctccgctttttcaatcgccgcgtcctttgatgtacaaagagccgtcggcgccacattttccaccttcacaaaccatccgtccgcatcaacactgggtgttactgcatatgttttcatccttcttacctcccggtttcgatttatttatttgtttcccggcattcggaacggtaaaacacataaccctctcctgacaaatacagggaaagtgatatttttctattctttttcatgagaaatggtaaaatgaaatttggatattttttaaggaaaggacggtgcttagcatgacagaccttctgaatgatcggctgccgccgcaaaacatagaagctgagcaggccgtgttaggtgctgtttttttacagccgtctgcgttgacactggcttctgaagtgttgattccggatgatttctacagaatgtcacatcaaaaaatttacaatgccatgctcgtgctcggagaccgcggtgaaccggttgatttggtcacggtaacgtcagagcttgcgaataccgatttgttagaagaggtgggaggcgtctcttacctgacggacatcgcgaattccgttccgacagcggctaatatagaatattacgcgaaaatcgttgaggaaaaatccattctccgccgtttaatcagaacggcgacctcgatcgctcaagacgggtatacgcgcgaggatgaagttgaagatttattaagcgatgcggaaaaaacgattatggaggtcgcgcagcgaaaaaattcgggcgccttccaaaatattaaagacgtgcttgttcaaacatatgacaacattgagcagcttcacaaccggaaaggcgatattaccgggattccgaccggctttatcgagcttgaccggatgacggcgggttttcagcggaatgatttgatcattgtcgcagcccgtccgtctgtggggaaaacggcgtttgccttaaatattgcgcaaaacgtggccaccaaaacggatgagagcgtggcgatattcagtcttgagatgggtgccgagcagcttgtcatgcgtatgctctgcgccgaagggaatattaacgcccaaaatctcagaacgggtaatctgacggaagaagattggggcaagctgacgatggcgatgggaagcctgtcaaacagcggtatctttatagatgacacccccggcatccgcgtcagcgaaatccgttcaaaatgccgccggctgaagcaggagaacggattgggcatgattttaattgactacctgcagctcattcagggaagcggccgttcgagcgacaaccgtcagcaagaggtatcggaaatttcacgggcgctaaaagcgctggcgcgggagctcgaagtcccggtcatcgccctgtctcagctctcccggggtgttgagcagcggcaggataaacgtccgatgatgtcagatatccgtgagtcgggaagtattgagcaggatgccgacatcgtcgccttcctgtatcgtgatgattactatgataaagaatccgaaaacaaaaacatcatcgaaatcattatcgccaaacagcgtaacggcccggtgggcaccgtctcactggcttttgtgaaagaatacaataagttcgtaaatctggaaaggcgctttgatgacggcggtgttccggcaggtgcgtaaagcctcaagcaatgtcttgaggctttttttcatccgaaagaatgagagaatgccgtctgttcggcagtcgataaaaagaaagcgcttttatataatggcattaagggagggatgatgatgacaattgaatttccgcaatttcaagcggcgcaaatccggattgcccggccgaccggacagctcaaagaaatcatcaggttttatgaagaaggcctcggattgaagagggtcggcagtttttccggacatgagggctacagcggcgtcatgttcggcctgccgcatacgcaatatcacttagaattcaccgaagaaaccggctcgtctcagccggcgcccgttccgcacggcgacagcctgcttgtcttttacatccctgatcagcaggaggtcattcgcatcagcacgaaattaaagcagatgggatatgaggagaaagaacccgaaaacccgtactgggaagaaaaaggcgtgaccatcgaagatcctgacggctggcggatcgtcctgatgaatacaagcggaatataaatgactgtctgaagaacccgggatatgggttctttttcgtgttaaagtatgaaagtttcgggagtaatagatagcaaatgaaagagaaaacgcttttaatcaggtttaaggcgaacaaatatagaataataagattttaatgttcggatttacgattgactttctgtttcggcactgatacacttaatttgtttgaatgagatatcgttttgaaaggttaacggaggtgcacggatatatgtcttcagtagtcgtagtaggtacgcagtggggcgatgaaggaaaaggtaaaattacagatttcctatcagaaaatgcagaagtgatcgcacgttatcaaggcggaaacaatgcaggacataccatcaagtttgatggcgtcacgtacaagcttcatttaatcccatcaggaattttttataaagaaaaagcgtgtgtcatcgggaacggaatggttgttgatccgaaagcgctcgtaacggagcttgcgtatcttcatgaacgcaatgtgagcacggataacttgagaatcagcaacagagcccacgtcattcttccataccatctgaaactggatgaagtagaggaagaacgcaaaggggccaacaagatcggcacaacgaaaaaaggcatcggacctgcttatatggacaaagcggcgcggatcggcatccggatcgcagacctgctagatcgtgacgtgtttgcagaaaagcttgaacggaaccttgaagagaaaaaccgtctgctggaaaaaatgtatgaaacggaaggcttcaaaattgaagatattctggatgagtattatgaatacggccagcagattaaaaagtatgtatgcgatacatccgtcgttctgaatgacgcgctggatgaaggccgccgcgttttatttgaaggcgctcaaggggttatgcttgatattgaccaagggacatacccgtttgtcacttcatccaacccggtcgccggaggggtgacgatcggttcaggcgtaggtccgacaaaaatccagcacgtcgtcggtgtatctaaagcgtacacaacccgtgtcggtgacggtcctttcccgactgagctgaaagatgaaatcggggatcaaatccgtgaagtcggacgcgaatacggcacaacaacaggccgtccgcgccgtgtcggctggtttgacagcgttgttgtccgccatgcccgccgtgtcagcggaatcacagatctttctctgaactcaatcgatgtgctgactggcattgaaacattgaaaatctgtgtcgcttaccgctacaaaggtgaagtgattgaagaattcccggcaagtctgaaagctctcgcagagtgtgaaccggtatatgaagaaatgcctggctggacggaagatatcacaggcgcaaaaacattaagcgatcttcctgaaaatgcgcgccattatctggaacgcgtatctcagctgacaggtattccgctttctattttctctgtcggtcctgaccgttcacaaacgaacgtcatccgcagtgtataccgcgctaactaagaatttgcagcaaacaagcctccggtcacggaggcttgtttttttatgtaggaaaaaaataatagattttttttcaaaaaagtagttgccactttcgaatgttctatgatattataaatctcgttgttacggaacagcttcaatagagtactgcaagaaagcttttgtctcaatgctctatgatacataatccgacacatcaagagccattagctcagttggtagagcatctgacttttaatcagagggtcgaaggttcgagtccttcatggctcaccactttttatggcccgttggtcaagcggttaagacaccgccctttcacggcggtaacacgggttcgaatcccgtacgggtcattgatttactttagcgttattgctaactccttatttgtcctcggagggccgccacgatacggttctccggacaaattactgtaaggtccggtagttcagttggttagaatgcctgcctgtcacgcaggaggtcgcgggttcgagtcccgtccggaccgccattttactttactttatagtatagaaaagaaacatctggctcggtagctcagttggtagagcaacggactgaaaatccgtgtgtcggcggttcgattccgtcccgagccacttacccaaacgcatctgcaatagtaggtgcgttttttcttttgttataaaaaagggagagccggcttttcagccggcccagaagaagacgtcaaacactagacggcgttttttttcttaaggtttcaaaaaaatattattttttaaaagaaaataaaaaacatgacaaaaggatggcagttcaatacgtttttgcgctgttctctttaatttttttatcttttgacctgaaaccgttataatagacggggaacgtttttcacgatacgaattgtgatcatcatgaaacatcaatagatgaaatgaagtcattctggcaggaggaaaatcaagatgatggataagaaaatccttgtagtcgatgatgaaaaaccgattgcagatatattagagtttaatttaagaaaagaaggctatgacgtgcattgtgcgtacgatggaaacgaagccgtggaaatggtggaggagcttcagcctgatttaattcttttagatattatgcttccgaataaagacggagttgaagtgtgccgggaagtccggaaaaaatatgatatgccgattattatgctgacggcaaaagactcggagattgacaaggtcatcgggcttgaaatcggagcggatgactatgtcacgaagcctttcagcacgcgtgagcttctggcccgcgtcaaagcgaacctgcgccgccagcttacggttgcgccggctgaggaagaatcagcttctaatgacattcatatcggttctctcgtcattttccctgacgcttatgtcgtatcaaaaagagaagaaacgatcgagctgactcatcgtgagtttgaattgcttcattacttagccaaacatatcggacaggtcatgacccgtgagcatctgttgcagactgtgtggggctatgactatttcggtgacgtgagaacggtggatgtaacagtgcgccgtctccgtgagaaaatcgaggataatccgagccatccgaactggatcgtcacaagacggggtgtcggttattacttgagaaatcctgaacaggactaaccggcgatgaataaggttggtttttttcggtcgattcagtttaagatcacgctgatctatgtgcttctcattatcatcgccatgcagattatcggcgtgtactttgtgaaacaggtggagaattctcttctcaagtcctatgaattatcgttaaatcagcggattgacaatctatcctattatattgagcaggaatataaaggagataatgacagcaccgtcattaaagatgacgtcaaacggattttgaatgattttacgaaaaacaatgaaatacgggagattacatttgttgataaaagctatgaggtcgtcggttcttcgaggccttatggcgaggaaatagcggggaaacagacgactgacccgatttttaaacggattttctcaacaaaacaggcctattcaaaaaaatattatgatcctaaaagcaaaaacagagtgctgatttcagcaaaacctgtcgtcacagagaatcaggaagttgtcggcgcgatttatgtcgtggccagtatggaagatacctttaaccagatgaaaaccgtcaactcgattcttgcttcaggaacaggcttagcccttgttctgacggctcttctcggtatatttctcgcccgcaccatcacccatccgctatcggatatgcgtaagcaggcgatggaactggcaaaagggaatttctccagaaaggtgcggaaatacgggcatgatgaaatcggtcagctcgcaacgacattcaaccatctgacgagagagcttgaagatgcccaagccatgacggaaggggagagaagaaagctttcttccgttatcgcgtatatgacggacggtgtcatcgctacgaatcgcaacggggctattattcttttaaacagccctgcgcttgagctgctgaatgtttcacgtgaaacggctttagagatgccgattacgtctttattgggcataaaagagaactttacatttgaggatttagtagaacagcaggattcaatgctgctggagatcgaacgtgacgatgaaacgactgtactgcgggtgaatttttccgttattcagagagagcacggaaaaatcgacggtttaatcgcggttctttatgatgtcaccgaacaggaaaaactcgatcgggaacgcagagagttcgttgccaacgtgtctcatgagctgcggacaccgctgacgaccatgcgaagctatttagaggcgcttgcagagggcgcgtgggaaaacaaagatatcgctccgcgtttcttaatggtgacccaaaatgagactgagcgcatgatcagattggtgaacgacctgcttcagctttctaaattcgacagcaaagattatcagtttaatcgggagtggattcatatgatccgctttatgtcactgattatcgatcgttttgaaatgacgaaagaacagcatgttgaatttatccgcgagcttccggacagaaatctgtacgtggagattgatcaggataaagtgacgcaggttctcgataatatcatttctaacgcactgaaatactcaccggaaggcgggcatgtcactttctcagtcgatgtgaacgagaaagaagagctgctttatatcagcgtaaaagatgaaggtatcggcattccgaaaaaagatgtggaaaaagtctttgaccgtttctacagagtggataaagcgcgcacgagaaaactcggcggcaccgggctcggccttgcgattgcaaaagagatggttcaggcgcacggcggagacatttgggccgacagtgtagaaggcaaaggaacgaagattacatttactcttccatataaagaagagcaagaggatgattgggatgaggcgtgaaaatataaaaacagtcatactgtcagtgctggtcgtcattagtcttgttttaacatggggaatttggacattccagcccaatttttcagaaggcacggcctcaaccaaatcgactgtccgggaaaagcataaaattgataaaacgagccaaaaagtgtcgcaaacggtaaaaccccgggatatgtttattcatacaaacggctctcattataaagtggatgatgagacgctctttaatgacctgtgggcggatttgccgcaatgggaagtaaaagggatgaaggatatttccgatcaatacgacaagctcggttttaaaaattggctttacggcagaaacggcaattcggcaaagctcgatctgcaattcaatgacaccattccgattgatttcttccaatcgatgtttaaatggtcaaatccgtcaatggaatacagctcatttgaccatattgttattccgtttaatgagaataagacgaataagaagatttacatggtctcgtacagcaagcagctgattttggaagtgactgtggaatcggcgaattaccgcaatctgatgaatgagctgtacagcaaaaagtcgagtatgccgttataccacctctattcggtcggaaaaagcaaagaatttctcatgccgaatgcgcggtttaatatgaaggaaaaagaatttatcactgaaaccattaagacgaacctgtttaagcagacgctttttaatgatccgagcacggtcagagaggacccgaattacaatcggaatgtgctgactgacggaatcagccgtctggaaatcaattcgacacagcggcagattcaattccagcatcggaatttggcacaaagcgcttcttaccaaacgggtgagctgattaagaaaagctataaatatttagaggatacgggaagctggacggatcattatcaatttttcaatgtgagtgataaccagcagctgagtttctacatgtttaaagaccaaatgcctgtgatcaacagcacgtctaagcctttcggatccggacctgttttgaccctgcaatgggccaatgacgaggttctcagctacaagcggccgaactatgttctcgggccgaatccgattaaaacaaaagacgtaaaaatgatgaacggcaatgaggttgtgtctctgctggagcagcaggataaatacgacgtgaacaaaatcgaccagatcttcctgtcctatcaaatggtctcttcttcaacgaatgatctcgttgaactggaacccgtctggagtatgaagatcaacgggaagatcgtcccgattacgaaagatctgctggggaaggaggaggacgataatggagtggaataagacaaaaacgatcttcatcattgccttcctcatcctcgatatttttctcggctatcagttttttgaaaaacgctcgagcagtgaatacgaagtgattaaaaattcaaacgtggaaaaagacatggagatggaccatatcacattcggcaacctgtcttctgattccgcgacgggctaccggctgacggcgggccaaaaggtatttaccgctgaagatattgatgctttgaaggatcaaaagccgttaatggaaatgccggcggatgatcataaggtcacaacgctgaaaatgaaatttaccgatccggtcggtttatcgaagcaaaaaccgcaggaggatgcggaatcgctcgtcagttctaaagtaaccggcggtgaaaaatataaactgtggaaagtcgacaaggatcaaaaacagatcattttttaccagacatatgacggacagtttatttatcaggattttgactcgtccacggatgcgatcggacaggtgattctgcatctgaacgataaaaaccaggtcgtatcctacgagcagaccatgctggagtcattcaagcgaatccagaccgagagcctgattcctgagcttgatgcggtcgaattattgtattctcaaaattacttaaaagcgaattgcgccgttaaaagcgtcaagttcggctatattgcccaatacccgctgacaagtacgcaggtgctggcgccggtatggagaattacaattgaagataagtcaaaagggacgaagaaaaagacacagcaaacgtacactgtgaatgcattggaaagcacagtcattgataacaatcaaaataaataatggagtgagacacaatgggcttgcaatttagcgtgcttgcgagcgggagtaccggaaacgcgttttatctggagacagaggagcattcttttctggtggatgccggcctgagcggtaaagcgatggacgggctgatggagagaatcggccgcaagatagacgacgtcgacggcatctttgtcactcacgagcacagcgaccatattaaagggctcggcgtaattgcgagaaagtacggtctacccgtctacgccaatgaaaagacgtggaaagcgatggagaatcagatcggcaagcttgataccggacaaaagtttttgttcccgatggaaagcgtaaagtctttcggcgggcttgatgttgagtcattcggcgtctctcatgacgcggccgagccgatgttttatgttttccactaccaaggcagaaagctcgcgctgatgacggacaccggatatgtgagcgacagaatgaaaggcatcatccgttcggccaatgtgtttgtgtttgaaagcaaccatgacgtcggcatgctgcaaatgggcagatacccttggagcattaagcggcggattttaagcgatgtcggccacgtctcgaatgaagatgcggcgctcgccatgactgatgtcatcggcgacggcacatcgcgcatctatttggcgcatctgagccaagacaacaatatgaaggaactggcgagaatgtccgtgcagcagacattggctgcgaaaggatttgtcgccggggaaacgtttcagttatttgataccgatccgaaaattccgacgccgctgtgcgccgtgtaatttttccaaatgaatcatgattattaatccgcgatctgacccacactataagcaaatcgagtactcttgaaaggatttgagatagggtggattataatcgcgatgatgaacagtacgcctccgaacagccccgccgcagcaagagaggatactttctatcaagtctgatcggcgtcatcgtcggggccgcgctcatggctttcctgatgccgtactggacaggcggagaccatggagacagcagcaaaagcaccagccggcgtctcggcagcgaacaggtgaaaacagtcaacgtaaatgtcaatgacgctgtcacgaatatggtcagccgtgtatcggattcggtagtcggcgttctcaatatccaaaagactgatatttggggagagggcggcgaagcgggaagcgggtcgggcgtcatttacaaaaagaacggaaacacttcttatatcgtaaccaatcaccatgtcattgaaggtgcgactgagattgagatcagcctgaaggatggttcgcgcgtgcctgctgagctgatcgggagcgaccgtctgatggatctcgcggtactgaaggtgaagtctgataaaatcaaatcggccgcccagttcggcaattctgatcaagtcaaagtcggagaaccggtcattgcgatcggaaatccgctcggacttgaatttgcgggatcagtgacacaggggatcatttcaggcacggaaagagcggtgcccgttgactcaaacggcgacggacatccggattggaatgcggaagtgctgcagaccgacgccgcgattaatcccggcaacagcggcggcgctttgatggatatttcgggcaaggtggtcggcatcaactcaatgaagatcgctgaatccgccgttgaaggaatcggcctgtccatcccgtcaaagcttgtcattcccgttattcaggatttagaaaaatacggagaagtccgacggcctttcctcggtattgagatgaaatccttaacggatattgcgagctaccattggagccagacgctgaaacttccgaaaggcgttaaaaccggggcggtcattatgggtgtcgacgcgttttcaccggccggaaaagcgggtttgaaaaagctcgacgtgattaccgggttcgacggacataaggtcaatgacgttgtggatctccgtgagcgcctgtatcgcaaaaagatcggcgaccgtgtgaacatcacgttctaccgttcgggaaagaaaaaaacagcggaagtcaaactgacagaagcagatcgattacagaaataaaaaagcagcccggacatccgggctgttttttattgatttatttgttaatattatactattgtgaagcagggaggtgaaacacatgaaaacggctgatgtgatcatcgtattgaatgaaatcgagggtgaatgtgaaggaagaattattttagaatgcagaatttaagaaaatgaaacatgtcatattaaacgtcctttttcaggggcgcttttttttatgccttttttcagaagctataaaaaagaactgaacgcgggtcacaacacgttcagttgaaaatggatatatgtagaaaaaggcagacatgaccttagaactttgtgattgaaacagactggtgctgctgaatagcggcagatgaaactgccggcagcttatttgcagatggctccgttttcagcgtttactttcaccaattcagcttagcttccgttttgtttcagataaaagcgaataatagaaggggaagcgaaaaaaataaacacaggctgatacatctaaggagagactgcatcatgaataagttgaaaggcatcaagctgctgagtgcagacggcgagtctgcactcattgattctttaacgatggggcttcatcacggaacggttctcggggaagacaatatcgtcgagacatacattcgttctttgcgcgaaaagctgaaggacaaagaacacaaggtgattcgcacggttcggggcgccgggtacagggtggacctggcatgaaacggctgtacagaaccctgcggttccagctcctgttcaggtcactggcgattttgaccttgctgttatgtttcatcggcggtacacagtacatgtttatgagacggacgatgtatgaaaatcaggcgatcagcattcagagtgatatcaattcaatggatcaaagcgtatggaggtcaatcaaaacccctgcccgttccgaaacaccggctcatccgaatgtgatttatcccggggtgacggttgcttttatcaatcaatcatacaagatgtcagttttatcagaagacccgcacgcgggagccgctccttctttcccgaaaaacgtgtatcgggatgcgctgacagatacaatggcgcttcactatcaggtggctcacaataaggcgggtgaggaaatcatcgtcgtgtttcaggcgatttccgttgacggaaggcaggcgggagttgtacagatgagcacgctgacccagcctctgaatgattcgcttttccgccagatcagcattttcgcgatactttcctttgcggctttggttatcggactgtttgtttttttgccggtgatccggctcacactcaagccgctgtcccgcattgtgcatatgatgggtgacattcatgccggcagtctcgataaacggctgccgattgataggaagcaggccgaaattgagtcattgggcatctccatcaatcagatgctggaacggattgaaaccgcgtttcaggcggaaaaagaagcgaaggagcgcatccggcggtttgtatcagacgcatcacatgagctgagaacgccgcttacctccattcacggctttatcgaaattttaatgcgcggagcggcggaaaagccggagcagaaagaaaaagcgcttcaaagcatgtacgcggaatccgtcagggcgaataagctgatagaggatcttttgtttctcgcgaagattgaccgggagccgagctttgaaatgaaaaaaggggcattgggagacgtcattttggaaatggaggctgagctgaagctgcttgcgagaaaccggaaactcgagttctttgttgatcaaaagatagaagctgtttttgacaaagacaaaatgaagcaggccattctcaatctcttttacaatgcggtgcagcatacggatgaagacacgggtgtcatcaccgtctccctgcagaaagacggaggaatcatgcttatgattgcggataacggaacgggaatcgctccggagcatgtgcctcatgtgtttgaccggttttacagggcggaaacctcccgatcccgtcaatccggcggcgcggggctgggtcttgccattacaaaaaccattatcgacagccataacggaacaattgaagtgaaaagtgagcagggaaaaggctccgtgttcatcatccggctgccgggataaaccgggatagcggaagaaatatcacaatttatatataaattctaaattttcaaaaaataacttgtccttttccaatattgatgataatatctagttattggcaaagggggtgtgtactgatgaagattgaagaacttgatcttgatacagaaacagcaagcttggtgcatcgctgctagtaaagccgtgactcccctttttggggagttattatctttcagggggtatgtcatgatgtcaacggactgtaagcgctggaagtttaaagacagcgtgcaggtgctgacctacacggggcatattatcattcaatatcgaaaggcgattaagcttgcgcatacgagtgagatcaaagaggcggttgaacggctgatcaccggctgtgaaaaacaagagctttctgatcttctgggagaggaagcgggaaaccagtttttcgatgcgttaatgaaattggatgctttaatagagccatggcaaaacggccgtgaaggctgcatcactgaaaagcagctgtaccattttgagaaatacaaccaaaaccccaatctgatccaaaacagattagacggcagcagggcagcgatcgtgggtctggggggcgtcggaacgatcattcttcaaaaccttttggcggcgggcatgcagcattttattctcattgatttcgatgccgtatcagtacataacctgaacagacaattcgtctatactcaatcttctgtaggcaaattaaagatctcagaatgcagagattatatcgcgggtatcaatccccatgcggacgcagcactttaccatcaggaaatgacacagccgcaggacctgcgtgtgttagatccgtacgaaattgatatcgtcataaatgccgctgacaaaccccataacatttctgaatgggtttatcagtattgtaaggagcggaatatcgcgtttatgaccgggggtgtcggcagcttcagcggccaatgggggcctctgctcacgcctgaatcctatcaatccggcgtcacctatgaaaaaaacatgccggccggacttctgaactgttaccccgatgaaccgatcaaaggttcgttaggagcgacaaacggtattatatcctcgtttatgtctcatgacattatcacataccttgcaggcggaagcccgaaatccctgaatacccgcatcggcctggactttgacggacttcatattacagaaacgaagctttctcaaaaggaaagcgctttatgaagacgatgcatcgtacggcgagaaaaccgggcgaccctctgaaaatagaaatcgacacaagcccgatacgcttgaacccattagatacgcaggattacacaagcaagatgatttgcagcattatgtatgaaagcctgcaggacggctataactgccgaatcatccgcaaagatcgccgcacctgtcaggtggacattcacccggactatttaggtgacgccgagggtgtggttcaaacgatcatctatcatctgacaaaagaaaaccaaagtccccatctcggcagtttcctgaacataaaacaggccgttccgtatgtaaaaggcctcgtctcatccgatcagctcggggtgaacgtaacgggcgaaaaacgctttgaagtcaccttggacgagccgtctgatgaaatagaagccgttttgcagagcagctttctgattccggcgaccgccgggggcgatgtgccggaaaatggcccgtaccgattcaagcgtacgtttgagaagggactggaatttgagcggaatccgcaatataaaatgacgcccgcggatcaccgcaccgttcagatcatccaatttattttgaatgatgatctggaaaaaagcatctggctgtacgaagcgaatcagaccgatgtgacctgccacacccagtttcatcattccaacatgaggtatcggcagtatgctgattttaaagaaaatcatttgccgatgttatttaccttcaaggtaaaggacggcatgctgagaactttcattcagcattattttgataaacaaaagctggccggcgatttggggcatatcatcacaccgactgattcactgatcggtatatgggaaagcggacggacaccgcagaaagatccgccccttttgacaaaagaagagccgatccgaattgtttatgccgattattatcccaacggagagatcattgaaaggctgactgaattgtttcggagggccggagcggacgtatccgtctcccgcgtcagtcatttcaatgattattaccatatggataaaagcgggtttgatattgagcttcatttgttcctgccggcttacatgcatgagctgagctatatcaaatatttcattcgcgacatcagcgatccggggaagaaaaaaacgatcattgatgccataggatctgaaaaaaagaaggaactttttgggttattcgagaatacaactcattattgcccaatttgttttgggaaaagtctgtatctgcaagatccatgtatagagggttttagtgtaaagactgacgggctcctttctgttcatgatgttaaatgcagatagctggaaaggggtattcatttgcggaatcgaaatttgctttacttctccggttttttcggaaacttctttttcgaacggggaatttggattttatatttaacaagcatgaattattcattgtttctagtgggcatcctgcaatcggtcctgaatttggcgatgtttctggcggaagtgccgagcggcgtcatctcggacagaatcgggagaaaaaaatcgctcttgctcggtcattttatggtcattgtctatttggtgatgttcctgagcttccataacttcatcgccctcttcatcgctcatattatatacggtatcgggctgacgtttatatcaggaacggatcacgcctttttgtttgattcactgaaagaacaagggaaagaaaagtggtacggcaaatccatcggaaattataacggacttgtcatactcggtcttgcgatcgccatgggcatcggcggctacttgcaggaaatatcatggtcgtatgtgtttatcgccgggattgtgactcagctgattgcgatggcggtcattacacagctgacggagatcaaatttgaaaacagtgaacacgaaacgcagacggtcggggacatcttaaaagaagtcaaagatttcttcaggctgaacaaagcctttaaatatttggtgctgtcactctccgttttctttgcgattacatcggttttttatatgtacggacaagatctgttaagtcaggaagggctgtccgtgcgcaatatatccattatttttgcggggctgtccatcttgcaggcactgtgctccatcttttcttcaaagccggcggaaaaattcacgccgaggcgcgtgcttctgctgacattctgcatcatcggggcggcctatctgtttataccttcgggcagtctgtacgtgacgattgcagcttttgttgtcatcaacgcgctctatgatgtgatagaacccgtatccagtcaggtggtgaataatgagattccgtccagaacgagagccacgctgctgtccattatcagtttgatgacctcgctcttcatgttcattgcctttccgtttatcggattcttaacggactattttgattcagctttgctgctgaccgcaatcggggtattatccatcttattgtcgctgtttatgatgctcagcttttacaaactgaaagcgagcgtcgccatccagaataaagtcgagctttgaaccagaatgacaaagggatgatgtgagttgctgaatattcataatcttacggtaaatttagcgggagataccattttcaaacaagtttctttcttcatcaatgaaggcgaaaaagtgcttgtggccgggccgaacggttccggcaaaagcacgctgttcagggtgctttcaggggagcttgaggcggatgaaggaacgattgcgatcaacaaaggggcgaaggtcggtttgctgaagcagatcgctgatccccatgaggatctgacgttgtatcaatatctggaaaaatcgtttgaagctctcgcggcgatccagaaggaaatgaaggccattgagctgaagctttcggaaccgatgggtgaggacgagctgactgctttattggaaaagtacagtcaatacacggaaacatttgagcggaacaacggctaccagatgcatgcgatgattgacgaggtatgcaacgggctcagcctcagcgaattaaaggatcagccgttttcaaagctgagcggcggcgaaaaaacaaaagccggccttgccgaaattttaatccgcaacgacgacattatactgctggacgagccgaccaaccatttggatgttcatgcgattgagtggcttgaagggtttattaaaaaatcgaataaaaccattctgtttacgacccacgataaaacgtttgccgaccagacggcgatgaaagtgctcgagattgacgataccgaggtgaagatttggccttacggtttcagcgaatacctgaaaaagcgggaagaattcatcatcgcccagtttgagaaatatgaagaacagcagagaaaaatacagaagatgaaggaatccatcgcccagctgagagattgggccaaccgctcgaatccgccgtctgtcgggctgcacagacgcgcgaataatatggaaaaggcgctgaaaaggatcgagctgatcaataagccggtccggacggagcaaaaattaaaaaacgcatttcaggaagcgggcgccggttcaaaagatattgtgttcattgaaaacggaaaggtggccaacggatcttcccttttatatcaaaatgtgaatctgcgtataaagcataaagacagaatcggcatcgtcggcagaaacggcgtcggcaaaacaacgctgatccgctgcatcatcggggaaagagaactgtcggacggcaccattaaagtaggggaaaatcttaagataggctacattgatcaaaagagccacgtcggagattcgagtcagacgattctgcaattctttaaagaaaatctgctgactgaagagggcatggcccggaatatgctggccaagtacggattttacgggtcgtcggtctttaaaaaactttccgtcctgtcgggcggtgagagaatcaggctgaagctgtccatcttaatggaaaaaaagctgaatgtcctgatcctggatgagccgaccaaccacttggatattgaatctcaggaaattctcgaaaacagcctgatgcagtttcaaggcaccatcatctgcgtttctcacgacagaaacctgctggagaagttcaacaagattttctggcttgagaatcaaaacgtcaccatcttttcaggtccatacagttacgccaaacaaaaaaaacggcagattgccgaataaaaggggaatggatatgaccattgacagactgacaatcaatgagttatcgtacgatctttttgtaagcgagtatgctgataagaaaccttttattttgacgggggcaatggatcactgggaatgcaggccgtggacgcttgaatacattgacgaacactatggagacagaatggtcaccatccggaaatcagatatcgaaggggtcaaaacgtttaaacaagtaaagctttccaactatatcgagtacattgatcagaatgatgacaaatggtactgtgactggaattttacgcagctgaaccaaaatgacttagaccttgtctattccgcacccgagtattttacaaaagacacattgagagcggatgaagaaacgggacgggactggaaatggttctttctcggttctaagcagacaggcacgccgctgcatcaggattttaacagcacgcacgcgtggaacggcgtcattttcggggagaaggaatggattttctatcatccggacgactctccgtatttgtacgaaggaaatatcaatgtctttgatgaaaaagatatagagcaaaaaccgctggcgcaaaaggcgtctccgatccgcttcaggcaaaaggcgggagaaatcatttacgcgccgcgccattggtggcatcaagtcgagaatacggaacatacattggcagtgagtgagaacttttggtttaccggagagcggcttgccaatcagatataaacgaaaggctgaggagcacctcagcctttttttgtatggattcatttcatccggtccagaccgaattttttcaggcggtattgcaggctctgcctgctgattccgagctcgtttgccgttttggatatgttattgccttgttttctcagggttttttcgatcatgtatttttcgaagttttccattttgtcttttaaatctgtgccgggctgggtgcttgcggctgctttgctttccgtgtcagcgggtttgattttcatccggtattggtaaggcaggtgggccgccgtaatcgtcgtttcatccgtcataaagttcatggcgccttcaatcatatgttcaagctcgcggatgttgcccggccagtcatactccaggaaaaattgctgcacatcgtcactgatcgaatcgacatgcatttgaaacaggtggttgtttttctgaataaacacttcggccagaggcagaatgtcttccttgcgctcccggagcgggggaatgatcagcgtgacaacgcttaagcggtagtataaatctttgcgcagccgctcttctgaaatggcggtgatcgggtcttcattcatcgtggcgatgatacggacgtcaatcggtttgtcctgagctgatccgatgcgcctgattttcttttcctgaagggcgcggagcagttttgcctgcaggctgagattgagagagttgatctcatcgaggagcagggtgcctccctgcgcctgctcaaataagccgggctggtcgatggctccggtaaaggcgccttttttcgtgccgaataaaatactttcgaccagactgtccggcagggcggcgcagttttgtgagatgaacggggcgcctgagcgctggctgccgttgtgaatgctttgggcgaacagctccttgcctgttcccgtctcgccggccaaaagcacggacgatgatgtacgggttgcccgtttcgcgttttcgatgacttcctgaatgaccgggctgttgccgagaatgctgtcaaacgtgtagctgttctgttcttttctgtgcatgttctccctgatcagccgttcgagcttggtgacgtccttggcgatttccacggcgcccttgatctcgccgttttgcacaatcgggaaggtgtggttgatcgtcgtgatttcctggcctttgttattgaaatagctctgctttacatttttaatcgttttgccttcttgaagggcctgaacgagcgtgctgtcctgctgattggaaaacataaatacatcagtcaggtttttatgcaggacgtcccgttcatccatatcttcaatctgcatcattttcttattgtaaatgacggtgctgcccttctcatccaccacatgcagcccgacatcaatctcttccagaatgctttgtaacacgagtgtgtaaaattcgctggttgtgtgcaggtcaattccccctctcaatcgtcttaacattcattattttaaaataaatcgaacaggaaacgcaaaaaaattttgcgcttggctgaagtttgcacgcaaactgccggaatattttgcaggaaaagaaagaatgctggcgaaacatcccgttttttcggattggcacggaacttgctttataaaaagggaaagcaagatctaatgttgaatgattacaaaacaagggggaatcagattatgtcagctttcacaaaatctcaagaaattatcagtcaaacttcacattacggcgcgaacaactatcatcctctgccgattgttatttccgaagcgcagggtgtttgggtaaaagaccctgaaggcaatcaatatatggatatgctgagtgcttattccgcggtgaaccaggggcacagacatccgaagatcattcaggcgctgaaggatcaggcggataaaatcactctgacgtcacgcgcgttccataatgatcagctcggcccgttttatgagaaaacagccaagctgaccggaaaagatatgattctgccgatgaatacgggggcggaagccgttgaatccgctgtcaaagcggcgagacgctgggcatatgaggtcaaaggagtagcggataatcaggcggaaatcattgcgtgtatcggcaacttccacggcagaacgatgcttgcggtatccctttcttcagaagatgagtataaacgcggtttcggacctatgcttccgggtataaaattaattccatacggggacgcagaagcgctgcgccgggcgatcacgccgaacacagccgctttcttattcgaaccgattcagggagaagcgggcatcgtcattccgccggaaggatttttacaagaagcggccgctatttgtaaggaagaaaatgtgcttctgatcgctgatgaaattcagacgggactcggccgcacagggaaaacattcgcggttgattgggaaaatatcgtaccggatatgttcatcttaggcaaagcgctcggcgggggcgtcttcccgatttcgtgcatcgcggcgaaccgtgacattctcggcgtgtttaacccgggttcccacggctcgacattcggcggaaacccgctcgcttgcgcggtatcgctcgcatctcttgaagtccttgaggaagaagggctggcagagcgttcccttcagcttggccggtattttaaagaagagcttgagaaaattgataacccgatcataaaagacgtgcgcggacgcggcctgtttatcggtgttgaactgacagaagcggcccgcccgtactgtgaaaagctgaaaggcgaagggcttttatgcaaagaaacacatgataccgtgatccgttttgcaccgccgttaatgatttccaaggaagacttggactgggcgatccaaaagatcacaaacgtgcttcaaaacgcgtaataccttgatgcggcaatgctttccctcggcttgtatggaatttacaaataaaaaattcagcacactctatttgcgcggagacagtattttagtataatgtatctttatgtacgaaaatgaatttcatataacattcatatacaaatagaggctctttggacagcaaatcggtttcaaagcaccggcttggttccaatacaagttgctgaaggggtgcagaatagtgaatacaaatcaaaaagagaatcagcttcagcgcacaatgaaatcgcgccatttgtttatgatttcattaggcggagtgatcggcaccgggtttttcctgagtaccggatttacaattaaccaggcgggaccgctgggcgcggttctgtcttatctggtcggcggttttattatgtttttgacaatgctctgcttaggcgagcttgcggttgcccttcccgtatcagggtcgtttcagacgtacgcaaccaaattcatcagccccgctttcggtttcgcattcggctggctgtactggctcggctgggcggtgacatgcgccattgagtttttatctgcgggacaattgatgctccgctggtttccgcatgttcccgtatgggtgtggtgcctcgtgtttgtcggactgatgtttcttttgaacgcgattaccacaaaagcgttcgctgagtcggaattttggttttccggcattaaaattttagtcattctgctgtttattattttgggcggtgccgccatgttcggcctgatcgacatgaaacacggcgagcaggctcctttcttctctcatttttatgaggatggattgtttccgaacggcattaaggctatgcttattacgatgattaccgtaaacttcgcgttccagggaacggagctgatcggggttgccgcgggagaaagtgaaaatcccgagaaaacgattccgcgctctatccggcagacggtatggagaacgcttgtctttttcgttctctccatcatcgtcattgccggcatgattccgtggaagaaggcgggagtggtcgaaagcccgtttgtcgtggtgtttgaacaaatcggtattccatatgcggccgatattatgaactttgttatcttaattgcgctgctctcagtggccaactcaggcctgtttgcatcgacgcgtatcttatatgccatggcgaacgaaggacaagcctttaaatcgctcggcaaaacaactaaacgcggcgtgccgatgaacgctctgatcgtgacgctggccgtcgcctgcctgtccctgctgtctaaagtggcagcgccggaaaccgtttatatgtttctcttatcattagccggactaagcgcgcaggtcggctggattacgatttccctgtcacagctgatgttcagacggaaatacatccgcgaaggcggcaaagtggaagacctgaagtttaaaacaccgctgtacccggtgctgcctattatcgggctgacgttaaatacggtcgttctgatcagtctcgcatttgattcagaacagcggctcgccctttattgcggcatcccgttcatggcggtgtgcgttatcgtctatcatctgtatgtaaaaaagcataagcagtcagaaaaacagatagagctttaaatcttttcgtgtccaagtcatctttgagaaacccgcacaggacaacatacaacatgttgaggtggaaaaacggatgaacaagaatatctcagttattggaatgccgatggatttaggacaagcacgacgcggagtggacatgggcccgagcgccatccgctacgcgcatctcattgaacggttatctgacatggggtatgcggtggaagacttaggcgacatccccgtcaatcgtgaaaaactcaaacatgatgaagagctgaaaaatttgaactctgtgctctcggggaacgagcagctcgcccaaaaggtggacagcgtcattgagaatgagcggttccctctcgtcttgggcggcgatcacagcatcgcgatcggaacgctgacaggaacggcaaagcactataaacagctcggcgtcatctggtacgacgcgcacggcgacttaaacaccctggaaacatcgccgtcaggcaatattcacggaatgccgctggccgtcagcctcggcgtcgggcacgacacgttggtgaatctgggcgggtatgccccgaaaatcaagccggagaacgtcgtcatcatcggcgcgagatcgcttgatgaaggcgagcgtgaatacattaaggaaacaggcatgaaagtctatacgatgcatgagattgaccgcctcggcatgacaaaggtcattgaagaaaccattgactacctgtcagactgtgacggcgttcacctcagccttgatctagacggccttgatccgagcgacgcacccggcgtaggcacgcctgtcgtcggcggcatcagctaccgtgaaagccatttggcaatggaaatgctgtatgatgccgacatcatcacttcagctgaatttgtcgaagtcaacccgatcctcgatcacaaaaacaaaaccggcaaaacagcggtcgagctggtagaatctttgttaggaaaaaaactattataaaatatgcgcctccgcacctgcggaggttttttttgttgccacgaggaaactagcgggctgccaccctctttttggacctgtaaatatgatatatttattacacaaaatgggaaagggaggtgtcctgacagatggctgaggtgatggcccacgaaacagttgcgaaaaaaatcagtgactggtatgaggaaatcaaaaagcacaacactgaatcggctgaggcgttaagagaacaactgcttacggatctgcaaaatatgacacaaaatcaaacggtgctcctttattttaatttaattgattcccgctataagcttttaatggaagagtatgagaaaacagacggcattttaaaaacgatccagctgaacgccgataaagaaaaaacagaccagatgattcaatactattattatttcttttccggaatgcacgagttttaccgtaaacggtttatgaacgccattaatttttaccggattgctgaaagcaggctccggcacataccgaatgagattgaaagagccgagtttaattatcaagtggcgattgcctactatgaaatccgccaaaactactttgcgatgaaccacgcggaaaaagcgttggagatctacaaagccaatgaaatgtacgcggtcagagaagcacagtgtttaatggtgatcggctgtaacagaatggacttgttccactatcagaaagccgaagagctcctgcagacggcggttcatcaagccgccaaagcgggcgatccgcatattgaagcgctcgcccactttaacgcaggcatttgctatgaaagacaggaaaaactggaagaggcgcgggtcgagtttgaaacggctcttgatcaaaaggagcatttgcgatcagcgtattcggtgcggagtctgtacatgctggccagagtgttattgaagcaggcaaagacggatgagggccgattttggctgcataaagcgctgaatgccgctgaagaaaaaaacgagcccgtatacacccaaaagctgcgcatcttacagcatgtctttattgaccgcaatgaagaagcgcttgaatcagctttcgccgagttaagaaggaaagagctgtggagtgacgtttccgatttgtcgtatcaggccgcggcgcattttaaaaaacaggagaaatacaaaccggcggcgaagtattttcaggaatcaattgatgccaatgaccaaattttgagattaacggaggggattcgtaatgaaaacatgtaaattcattgtactctcagcagccttggcaagtctcatttcgattggattatttgcacaaactggttcaacggcacaagccgaacaaatcataaaaccggcggaaaacggagccttcggataatactgcatgatatcgctttcgtgtaaggagtgattcaatggctatcacgctgcagccgatgacaggacaagagtttcagtcctatctcgctcattcaaccaagcattacgctgaagaaaaggtaaaagcgggaacgtggctgcctgacgaagcgccggaattagcggagctgacgtttgaagacctgcttccagacggcttggagacagccgatcactatttatggacgctgacattggacggaaaggaaaatgccggctggttgtggctgcacgccgatccggaccacccgcagcaggacgcatttatttatgatttcggccttcatccgcctttccgcggcaaaggctatgcaaaagaggcgctcgcaaggctggaggacaaagccaaagatctgggtgtccgcaagatttctctccatgtgttcgctcataacgaaacggcgcggaagctgtatgagaagacgggattcctggagacggatgtcattatgagcaaaaagctgtcatgaaaagaggcccgcacgatgggcctcttttgttattcatctaacaatgtcatcatttgttccgggtaacgctcgccggccgccgtgccgatcggaaacatttcatccaaccgcgccttcacatcctccggaagcacaatgtcgagagcggcgaggttctcttccaagtagtgtttcttttttgtacccggaatcggaatgaggtcatcgccgtttgcgagaacccatgcgagcgcaagctgaggcgcggtgatattcatttcccgggcaatggcggtaaatttttggacgagccctatattcaccgccaaattgtctccctggaatctcggcgttcttcttctgtaatcatcggcatccagctgatctgtcgacgtcatctttccggaaagaaaacctctgccgagcggactgtaaggcacaaatgagatgccgagctcacggcaggcgggcagcacatgctcctctgcttccctgctccataaagaatattccgattgaagcgcggcaatcgggtgaatgcggacggcgcgcctgatcgtttctgcggaagcctctgacaatccgatatacctcacttttccttcgtcaatcagcttcttcatggcgccgacagtttcttcaatcggcacccgcggatcaacccggtgcagataataaaggtcgatataatccgtcccaaggcgtttcagactggcatcacacgcttttttcacataatcgggccgtccgttgatttcgataaactcacccttttcgcttcggacataaccgaatttcgtcgcgaggcacagctcctttctgaatggggcgagcgctctgccgacaagttcttcatttgcacccaatccatattgatcagccgtatcaaacaaattcacgccgagatgaacggcatgatgcagtgtggagatcgactcttcctcactctggctgccatagtattccgacatgcccatgcaccctaatcccattgcggaaacccgcatcgaaccgatcgttctgtccttcatatgtcctccccctttcttgtatgataaccagatttcctgatatttgaaaatgatttatgtatatgatttacatattgttataaaatttttaaaaatctgtaaattgtatatttttttatcacaatttcgtcatataatgaaaacgtggaaaaattaacctttgagaaaagaggcgaagtcaatgtgtaaaaagctgttcaaagccgtcctcccgtttgccctgtcattcaccatggttctgtcgttctccggtttgaatgtaaaagcgaaagaaacagaaataccacgctacgcaaaagaaatcgcagaccttcagcagggcacgactcctcaagacgttctccaatccgccaaagagcttgccaaacagaagcacgtttcaacagaagcaattctcaagcagtttcatcaagaaatcacggcagacaaggtgcaaggaaatgtaatcgcttccaaagacggactctctgcgatgggcggatcgtcaggaaccaaaaaactcccgaaaagcacaaaaggcaatatttattacacgaactcatacacggcttattacaatcacgggcatgtcggcatgtattcatccgctgataaaattgtcgaatccgtgccgggagacggcgtccgtcagattgcttataacggcagagaagtcgaagacaattcaatcgtccagaccgtgaaagttaccgatgctcaaaaacaagccgccgctgactgggccgtatcaagagtgggtgatgagtactccttcaacttcgtcaataacagaaatacgggccatgaaggcgccaaaaactgctcaaaactgctgtggtcggcattccttttaaaagcggggattgatatcgactctaacggcggcttaggcgtatacccgcgcgacatcacaagctcgtcctacacaaccacgatcctgaccattcactaaggagaacaacgtgaaaaaaatcatctggatacccttagtgatcatcgccgccgcagcggtcttatgcttcttctatttccgcacggaagaccctgcggaggttgcgagagacacattaaatgaccctgattttctgaaagataaagaggcgttgctgtatttctccactgcggctgaccaagacacgttcggcggcggaaaaagctacgccctcttcgccgatgaaaaagggcggctttcttcttatcaaatgaaggggcttgagctcggatcggccaaagtgcatgacgaaagcgtgctgctggaggacaaaaaaggaatctacaccgttcaggacggccttcacacgtataaaagagcgtaccagcatacgggagacagcgcgggatatatcgaacgggcgaaaggcttttacacgctgtataattcgggctacgacaagagcggcggcagctatcgctcagagctgtaccgccagatggacggcaggtggaagcaagacgtcatcccgcactatatccgcgcctcaggcttttttaaagatcatcttttcgcgctcacgccgacagatgacgaaaaaggctatcacgtccaagacattcaggccgataaagaaaagctccatacaacatcaatcgcgacgtggacgtataaagaaggcacgtctgtcgaatcccagctcgccgtggacgacagcgctgtctgctttgttaccagaggagaaaaagccgatcacatctatcaaatggtgaaagtcatgaaaaacagcggcgccatcaaaacgtatgacatcgccgcttataaaaatgacgaacagacgatctatgactccatgccgttcagcttcaaaaaaagctttttcatggagcatcgcagcttctatttcgttgacggcttcggaaccgtctaccgcatcaaccctgagaccggaaaaagcaaaaaggccttcaccctccccgcatcacgaatgaaggccgacttcaaggagctgacccatcaaaacggaaagctgtatctgttcacgtacagctacaaaaagcccgccaaaatcgaatccttcgacctgaaaacgggcaaaaagctgaacgacctgaccatcccaaacttaaaaaacatcgtcacgccgaaaagccatctcaagctgtatgatgtgcaggtgatggatgggttttaaagagtatgaacatttcggaagagcttgccgcttttggtaagctttttataatgaaacgttactgcgggaaagaaggtgttcatttgaaatcattcagtatcttcttattgttgtccgtcatttgtataaccattgtttttgtcataatgaatatgttgattggataccctgatgtgagtaacggggcattgattatgattgtatatatcgttgtgaccctcatgataaggctatatagcaagaaaaagaaatagaggaatttgaaccgtaaaagcagaagacagtcagatgaaggagggagccgatgaagaaaaagcttgccgcggtgaccgtcaccattctcctggtttccgtgataaccaactcttttttaaacggcggaaagccggactggattgatgtatgctgtacgctgctggcgtgtctattaggaattctgttcgtccttcgcttagaaaaaagagaaaacacgtaaagagccggatgctgaaaacaccggctctttttgcgcgtgatttgccgaattgtggataaaactcagcccgaagcactactaacatgtgtataaataggttatattgaaaagagaacaattgccgcgcgcaaaagaaaaccggaggatgtaacaatgaaaaccgcttattattcttgtgaagaacatatcgaaaccgtgctggacatgtacatagatgatcatgagcttccgcccgaaatcagaaaaatcgaacatactaacagtttatccacagcctgtgaattatgtggggacactgcaacatatctagtagggaacgaatgatcctacacaaaatacagaaaagatatccacaattgtggacaatatatatgaataacttgtttctaaagtggggatgacctgtgaatatcaatattgtgaccatcggaaaactaaaagaaaaatacctcaagcaaggcattgaagaatacaaaaaacgactctcagcctacgcaaaaatcgacatcatcgaactcccggacgaaaaagcgccggaaaacctgagcgaccaagacatgaaaatcgtcaaagacaaagaaggcgaacgcatcctggccaaaatcagcccggacacccacgtcatcgccctcgccatcgaaggaaaaatgaaaacatccgaagaactggccgatacaatagataagctggcgacttatggaaaaagcaaaatcaccttcgtcatcggcggctcactcggcctaagcgacgccgtcatgaagcgcgcagacgacaaactgtcattctcaaaaatgacatttcctcatcagctcatgcggctcatactagttgagcagatttaccgggcgtttcggattaatcgtggggagccttatcataagtgagtgaggtttgcaaataccattttcttgatgtattcagcataaaaataatcgttaaggatcatattttgttataatatattcatatggaaatattatgaatgaaaggatgaccattttggaaagaaaaatagatttacttatgaactcgcgtttcggggagagggtagccgaagaggatgagaatttagcatcgtattttgttgaaacggcagtatggaatcaattgttgatgggggaaattgatgtagtccgaggagtgaaaggttcaggtaaaagtgcattatatatgcaattattaaaaaaagagggtagttttgctgcgaaaaacaccttattaatacctgcagaaaacctagagggcacacctgtttttaaatctgttcttggtgatgctgatttaactgaaacctcgtttcagtacctatggtctatctatatcattactctgataggtgataaaatcaaagattttcgtaatagaagcgaagaagtaaaagattttattagaagacttgaattagaaggtttattagaaggtaaagggataagacgtctccttacgaatgttagagattatgtttttgaattctttagaaatgtaaaagaagttgaaggagtagtaaccgtagaacctacaactaatatacctattttaaaagggaaaatctctttaaatgaaccaagtaaagaacatagagaattaggagctatatcaatttttgaacttcttgaaatggctaatgaggcacttaaaagtgttgacttaagcgtttggataacatttgatagacttgatgtagcatttcccggaaaacctgaatttgaaaccttagctctaagaacactttttcaggtttacaataatataaaactgcacaaacatataaaattaaaaatctttattagagaggatatttggaaacgaattactaaaacgggttttagggaggcaagtcatataacaaagcaagtgacgattgattggtcagaacaggattttttacatttactggttagtcgtattcttgaaaacgatattctttgcaaattttttaatgtggaaaaagatgatgtattaaaagatagtgacaagcagaaaaaaatattctattctattttcccgaaaaaagttgaagtaggaaagaatcctgaaacatttaaatggatgattggacgggttaaggatggattaaaaataacagctccaagagaactcattcatttaatgaatgaggctagggcaaaacaaattaaattgttagaaactggtactccagaaaactcttattcagaaatcataggacgaagtgctttgaaggacgcattaaaagtagtatccaaaattcgtttagagcaaacaatttatgcagaatatgcacatctaaaaaaatacatagaaaaacttgaagaccagaaaactgaacatgatgttggtaccctttcaaaaatatttctaataaacaaagaagatacaataaatattgcaaatgaattagtgtctattggattttttgaggaaaaaaagggtagtcataaaccttattggacaccatttctatacagagccggacttaatatggttcaaggtaaggaagactaatattatagagataagagtaaagggggagtataaagcttccctattaattttttatgcttaagtaactctatattagatttaaaaaaattcacataaagctacatcaattctcaactgtcattagtcttaattaagcttgttaccatagggatgtttcgaagactttaatcaaaaatgattcaaatctcacttagatagagactatgataaattttatattatttaagtcgtcatttaattaacgtttattacaatagaaatataatctatagagggtgttgaaatttgaagaatgacattttgttacctaataaaattaaagtttttataagttcaaggtgtggacaaggttttgaaaggtatgatgaagtaagaaaacaactaaaaaaacttatcgaatcgacaaagattgctgatgtatatctatttgaggaaagtggagcttcgacacagtccgcagaacaggattatttatatgccctagatgatagtgatgtatgtctattcttaatagataataaagatgatgttacatctgcaattgttagagaaataactagagccaaatcacacccaaaaaagtcaatatatctattttgtaatgaaaaagaaagtaaacctacgcaaatccaagaagaacttattggagcaaaaggagctaaatattatatagttaatagttttaatgaatttgcaaatcaaggatttaaagatttaataacagacatatgtaatatttatagacactattgtaaaaatagactcatagaccaagaatttcacaattctgaacagaataaaatagaaataggttcaatagcttctgaatcactagagaaacgtattttacaaggaattgataaatcaaaagcatatatcggaaaaaagatattttctgttaataaagaagtgaaagaaacgagtgaattagatagattttatgagcaatttctaaaagtattatttggtgaaaaaagtattgaagaattcaatggggatttatttttagagcaaataaaaaaagagcaaagtgataatatgcatctagtagtaaaattaagatggaaagctattcagttttactggctcgatgattttgattctgtattaaaatacttaaaggaagcttttgacttatgtaaggaaagtgggttgcctgattggatttcacaggatatactgatagatttaataaatatagaaaatcaaaagttaaatcaggaaaataaattctcctctaggaatgctgcacaagaagagttagaaagtatgcgtcaatctctgttttacccatcaattgatagatatgaaaagctattatataaagaaattaataaagcatcaacaaaaaagaaaactgaaactgtgtatactgttaaccttggtagtaatttagatgtttatattaaatatttgactaacatttatattgttggtgcctttaatggatctttaactcaattattattattgagaaataaaataaaagatatatcatttcaattatgtgaggaatattccaattgggaattcagagtgttgctgttaaaaatggcagtaatagttggagatagcaagcaaacagaaaatataatttcctactttaatagcatattaggaaaaatcaattatattgatgtaaaaaatatttataattttacaaactgcctcccggtaaaatcagaaagaataaaatctaagctagaagtatttaaacatttagggtattattttagcgatgaagattacatgtgtatcaaaagagagttattggaagagattcataattatattgataatacttttatagtgtctatgggaaaattaatatttgattctttgaaagaaaatatcaatagaatcgaagccgatgaaatatctagagtatgcataaaaattttagaaaaaaagatgtttcgcttttatgatgatgctttaaatttgataggaataataagttttaaagggatatctactcaaaaccttgaaaaaataaagaatttgttgaaaggaatcattttagattctaatctagcaaaccagtgtcataacctcttatatgcaattataaatttaagaaaacagataatagcgggtacttcggaattaaatcaagttgtattaagtaacatgtctgaatcagatcgcaaaatttataatttagaaacatctagtgtcaaaagagaaagccatattatgagttatgttcaggagatcaaggaacaaattgagaaacaaggtaaaaatgggatttacagtgtgaaagcgcaaaacccatatctaataatccaaaatatcattaaagagggttgtgaaatagttgataactatctattaaatgaagttcttcaagtatgtaatgaatcgttatgtgcaactaatctactgtattctgataaggtgagtgctttacaattaactatttatattaaacagaatttccaaaatattgattataattttaaagatttatatcaatatttgattaaacacgaaaaccatctctttgaaggaaaagatgatctttttcaaaaatattcgacattaaccgtaaagattaattattttatgcttaaaatggtatgttgccaactagataatgttgatttattaaatctattaagtgaaattaataatgaggatgagtttgaaaaaatccaatgcttaaaggccattataaatgctataaataatgaatcatttaaaaatatagaatcagatattcgtagtatcattattcaattcactttaagtttgaagaatgacaaaaatcaagatatacggtatttatcaattaaagcattgctaaaaatgataacaaccaaaactcaaaaagttatactgactcagctttcacaatctatggattatgaaaatgtatatataaaaaatcttataataggaaactttgaaaaattagcaattatagattccaaagttaataatttaatattgaagaaagcttccatagataatcattatttggttaggacagaagcacaaaaatatatacagactagagcaattaatattactcaataaacttgtttagaaaaaaagagataataaatgtgaatcaaataatttactttcaaatttgaaaacaaattattaaggagtaaatacatgaaagaagaaatgattttaagaaaggtgatttattttttatcaacggcagaaacaccaagggaagtatttttagtatggaataagcacaaggaacatttaaaatactttaagttgagtataaacctagataattatgataaagatactttcccggttggattgggagaattggtaaatgcagttgatcaagactttatttcttactttcaaaccggaaagttatattacatggatgatgaattactgaatgatatgttatttaatggaagtatatcatttcctattgactattctgtgatgttagatactaattatgctagttatattcctcgctttttgaacaatcaagggagtagtgaatttgagaaagaaagtatttacaaaactatagatactctactaaaacataaatttcattatgattataatttctatttagtagaaaattataataaaattattaaagataatgggagttttgatgcttctataaaaaaacatagggatatgtacgagaatttagtatttttagagctatttaaaagcattgataatgatatatacataaataagaatattattgaataccaaatttcgaagtttgaggctatccaaagagtagacgatataatatataaattatataaaactagggatggtaaaagttcattaaagaagttcttagatatgcatcagaatttaacattacttctgatcggaattatcaaaatacagttcagttcaaaaaaaaatgcaaaaaataaaatgattaagttacttgaatatgtccaaaataaagtaggaatttattatgaaagagaaatggttattgcgcttaaatatttcaagaatcctaaatctgttgggatatttaataaaattaataaaggtggtaatcaaaaaaaattactcgaaaaaattgaaaacacagcttgggattttatggctccgagggtaatggaatatttctctaacttgaatagtgaaggaagatattttataccatttttcttatcccacgacaaaaacttgagagagcttttaactttatttgaaattaaaggggttttacaagatattagaacgggtcagttaataccattcacaaaaatctcaagtgctgagctctttaaaaatgaaggagtagaaatagatctttctttctattctcaggaatccacaaataaaagacgattaatatatgaaaagaatattaacgaaggttttagaattctgcaagatgaattctctgagttgaatgacataatgaattaattggagcctctctatattattttacatttaatttttatgttattttatatagcatgttaacagacctaggtataaaacgctggttttgttaatccctctgtgctgtataggcaataggataaacacattattattcctttgcggggaagttatataaatgcatttgctaaaagtgaatttaaagtgattattctactaaccgtacaagaaaataatacccatatcgcagtaaactgtgacggctaaatatttctagggagataaagccttgagtttaatcaatcggatgctcttatgtcaaaggaaaatactttttatataaagactcggtaaaccaagatcataagtcccgattatcttgtatagcaggccgatttgttgtcaatattcgatttactatgaaatcacttgttggcttatagtgaacaaaacaaaaaaaccagatccactaaaatctggttccccacagctgattagaagcaacctactgttgcttctctttcaccatctttataaagagaaagaagacaatgaatacaataaaataattcaatggattcttaacgatacttatctccagcgaaatctgtaagagtatccagagaatgaagatggctagtattgaaggaatgatgattttgtacatgtcgaccaccttccatagttagtaaaagaaaggggcgcgggccctttttttttcatgattaaaagcaagatgcggcagctcccgtcattgcaccgccaacagcgccggtaattgctccgacggcacccgctcctactgttccgatgccgggtattgtgactgttcctacagcagctcctgcaagacccagtgtgccgccgccagttaccgcaccgccgccagtacctagaatacatttcccgactgattgggtgctgattgacccgcttgtttttccagcgtctttgtttacgactttgactaaaacgccatttttgattttttcatatttcagtgtaacggggtcaccatttttgtcagtagagcttttcggaagagcctgctcctcgcccgttatgttgtcttttagggttgcattgcctttagcgtcaatatgaacatctgcatgattgaacgtcatcttcagctcactgtcgttgaggttttcaactttgtatgtagcttgggaacctgcggcagccgcagcatgaggtaaaaccgggagggcaaaggcacctgctaggaataccaaggctgccagtttcactgcggttagcttcattctgctttgcataattgatcctcctcctttggttgccatactaacaaaggcattctgcttgttaaagccttaccatataaaatgataaaaaattcacccaatttcatcacattaaccaacaaggtttgtatgtttcccttcgaaagtcataggagagcagggttcatatctgatgcgaagttatcaaggaggatagaaaccgtaaagaagagctcagagaagcacctttattgcgaacaacagcttcttccgcattttccacacgacagtataaatccctttccgtcacggaaacctagtggaaaaggtttctgaaaggaggggcgtatgatgaaaagtgaaaaaattcaaaacaaaacatctttggtttggaagatggcgattgcctctgcggtttcttgggaagcggcaaaactggcgggctctgatcacccctatttagcgcctctgtctgttatcttatgtttgcagccaacgatagatcagtcgattcgtttttcttttcatcgtattgcgggaactgcgattgggatcatgctaacgtcctttcttgtcagtcacttgccaatgaatggctggatgctggggctgttcctattaggcgggacttacattgcaaagtggttacgaatagatgtaacggttctgcatcaggtagcgctcaccattttattggtctttacgtttgaacgaaactctaaagattatgcattcgaccgaatcatcgatacggtgatcggcgtcatcatcgccattctgattcacatgttcctttttccgccggactacacaaaaaaggcagcggactcttttcaaacattggcccgtcagctttccgacgcactttcagacctttccaaatgggtgcaatcagagtggggacaaggaaaagggaaccttatggaatataaaatgaaccatcttctgcaggagctgcatacggcaaaagagatgctgcaaacagcctctgacagcttaaaattcaaccccgtcagaaaaaaacataaaaacatcatttcaagctatcaaatagagatgcaaaagttgaacgccggatttgagtatctgtcaaatatagtgaaaacgttaaaagaatgggaaaaagaaggagctttatcttcaagtgataaaagggagctggggaatgatttacaagtgttaagtgaatacttttcggatcttaaaggcatacagcagggtgaaacagacaatcggaaacagaaggaacagaacgtgttattggaatctctccgctccgacatgctgtcgcacccgccgcccggtcataaggtctataaagactctttttttttagaaacgaagaaattgctgaagcgtttgtaatgttttctggaaaaagagaatacggatatacagatatgatcaggtaaaagcgggggacatgagatggatgatatacaccggattttggatgtcatcgctaattctaagaaagctaaggtactggctaccatcattcaaacagaggggtccgcttataagaaagaaggggcttcgatgttgattttagaggataaaacaagagtcggaatgttatccgccggttgtctggaagaagatctcgttgaaagggcagaacaggtctggtctgcgggagaaccgttgattgtccgctttgatatgagtgcggaagacgatttatcctggggacagggcattggctgtaatggtgttttgacggtgttgcttgagcctgtaaaaggggaattggaacggcatctgatgacagtcaagacatgcttagatgaaaaaaagtctgtgacccgaatgaagcgattcactgaaacgttagagccgaaggaagatctgtatatcgctgaagacggcagcgtgtttggaaccggggatgtgatggaacaaggccgtattcaaaaactgagacagacggagaagggaatcaaaagggatgaacatacatctgatttgttttttatccatcagatggtgccaaaaccttgtttatatgtcttcggagcaggagaagatgcgaggccgttagtttcgttggcggctcgtgcgggctttcatgtgacggtgattgactggcgtcccgccttatgtcatcacggccattttcctgaagccggccatttgataacgggagcgcctgaagaagtcatgaaaggcctgagcatgacaaaaagggattttgttgtcattatgacgcacagctttcaaaaagatcagatcattttacatacattaaaaaacgagaatgtgttttataaaggcgtattaggcccagaaggcgtacggagcggcttttaggcgggggtgagattccggaagatatacattcccctatcggacttcccatcggggcacaaggccctgaagagattgctgtaagcattgtcggcgagatgattcaaaaaatgcgaaaacaaaggtctcgcctatgaaaacagcaggcatttacctggcagccggtacaagcagacgcatgggaacggataagcgaagtttatttctcaatggcgtttccctcggaagtatggctcttaaaaatgccttgttatctgaattagatcatatttttgttattacgagaaagggagattcactgcattggctttcggattttttctttttagatcccatgtcaaataagtggagccaggcagaatgtgagcaagcgggtaagggccaaggccattctatacaatgcggtttgcaaaaagcggcagcgtacgaggctgacgccgttatcattctccttgcagatcagccgtttgtcaccgcagatatcatcaatacgttaattgattcctatcaaaaagagcgccgttattcatttatcgccgctgaaaatcagcatcttcctatgccccccattttattctcaaatcaatgtttcccggtattgcatcagttaaagggagatcagggcgcccggcatgtgatccgtgaaagtatgatcaatatgggaaaaatgatcagctttcaagaccctttgcttttttatgacgtcgatacagttgaagattatacgctgctgctgaataaattcggggagtgaatgagttggagtatatcgggaagagtgtcattcggaaagaggcccttgaaaaagtgacgggtaaagcgaaatatacggatgattttcaagaaacagggacgttgcacgcaaaaatgctgaccagtccatatgctcatgccgatattgtgtcgatggacttttcagaagcttggaagattcccggcgtgagagcgatattgggggatgaaccttttccgcttgcaggtgaagaaattaaagacagatcgccgattgcttataaaagggtcagataccatggtgagccggttgctgttgttgttgcggaaaatccgattacagctaaaagggccgcggatgccatcaaagtatcctataaacctcttcccgtcgtcaattccccccgtgaggcctttcaaaaggatgcgccgctcgttcatgaacatgcggaccgctatgagaagacaaaaggtgtattcccggttccgaagacaaatatcgcaaacgtggataaggttagaaaaggaaatattgaagacggatttagggaaagtgatgtgacagcagaattccagatttcctttaacccttctgatcacgctgcgatggagacaagatgctcgatcgctgaaattcgggcggatgaggagattatcattaccacatcctctcaagccccttttgccattaaaaaattaatgcagtggtattttggaattgaacccggaaaggttatcgtcaaaacgcctttagtaggcggggcgtacgggggaaaagcagccgttcagttagaggtgattgcctatttggcatcaaaagcagtcggaggccggcccgtcaaattgtttaatacgagagaagaggatatgatcacatctcccgttcatgtaggattggatgccattgtcaaattaggggccacaaaggatggaattttaaaggcggcggacattcagcttttatttgatggcggagcatactctgataaaggagtggacatcagccgggctgcggtggttgattgtacgggtccgtacgctatcgaccatatatcgtgtgattcatattgtatgtatacgaatcatccatatccaagtgcattcagaggctacagccatgctgaagtgttatttgcttttgagcggacgatggatgtattggcggaaaagctgaacatggacccgttagaacttcgctataaaaatgccattcgccccggtgacaccacaccgactcaagttcttctcaattcaagcacggtcggaaatgtaccgaaatgtattgaaagattgaaggaattaatgaattgggacgagggacagcgaattgaaatcgacggccggaagatacgggcgaaggggatcagctgtatttggaaaacctcaacatttgatacaaatgcaacgtccggagtgattttaacctttaatcctgatggaagcattaatttgatgtcagggatagtggagattgggacagggacaaaaacagtgttagcccaaatcttagcggaacgaatgaaaatggatataagcaaaattcacgtaaaaatgcttgtagatacacaaacaacacccgagcattggaaaaccgtggggagcagagggacgttaatggccggaaaagccgtactgaatgcagcggaggaagccattcgaaagctgaaggacgcggcatcatgtgtgttgcgagttcctgtcgaggaattggaagtggccgacggaaaggtttattttatagatcatccttctgtacatgttgacataaaagacattgcttacggatatacgtttccgaatggaaataccattggcggccaaatcattgcgagcggcaattacacattaacccggatgacgaatttagaccgggaaacgggaagaggaaagccgggacccgaatgggctgtaggtgctcaggggattgaagttgagttggataaacgggattatacgtaccgaattacaaaagcctattctgttgtggatataggaacagtattgaatgaaaaagctgcaaggggtcaagtgatggggggatgagtatgggaatcgcattcggaggaagagaaacctttgtatttgattcatatggcagagtattaaatcctcagcttagaacataccgcccccttcactatggagagcagcctgaatatatcattgaatttgttgaaaccccgcatgtgattgcgccttatggagcgcgcggcggcggggaacacggactgctggggatgccggccgcattgggaaattgcctttccgccgctttaggtgtccaattgaatcaacttcctctcattcccgaacaattatggaggacgcaagaggggtggaaagatgataccgtttgattttgattattttaaaccgaagaccattcaagaaacaatcaatctatttcactcgcttgcggccgaaaagaaaacaccaatgtattattccggcggcacggaaattatcacgttaggaaggctgaatatcatctatacggatgcggtgatagacatgaacgcgcttccgggatttcaaaccatccgcttttatgaacatgaactggtgatcggagcgggtgtgtcattaacgaaactggaggaagaaaatccatttccgctattaagtaaaacagtaagtgaaatagccgatcggacgactcgaaataagatcagcctgggcggaaacatttgcgggggcatctactaccgtgaggccgtgctgccgttgctgatttctgatagtttgctagggattgcagggagagcggggattcattaccatcctataaataaagtatttaacaaggaaatacaattgcaaaaaggtgattttttatttcatatcgttgtcgatcgagcgtatgttgacttgccatttgtcagtatcaaaagaagacagcagtggaatgtcggatatccattggtgacagtctgtgcgctgaaaaaagatgatgagatcagaatggctttcagcggcgtatgtccatttccgtttcgttctgctgaaatggaggctgtgcttaacgataaaagctattcattagaagatagagcgcgcaggtctttacagtatgtacccaaacccgttcttgatgatgcggaaggctcaagtgaataccgaatatttgtcttgcaacatacaattttagatgccttacgggaattagaaggaggtccaaatgtctgatcctattacgttgaaagtaaatggcgaggaaagacagatgacggtcagaccggctgatactttgttatttgctcttcgtcttcgtctcggattaactggtgcaaagccgggctgcttaaatggggattgcggcgcctgtacggtattaacggacggggtgccgatgaaatcttgcttaatgcttgcggcagaaggggaaggaaaggatattacgacaattgaaggactgatcaatacgccgattcaaaaggcctttattgaaaaattcgcgtttcaatgcggttattgcacaccgggttttctcatgaattgtcatgctttagtgaatactgagccgaatgcaagtgatgacacgattaaaaattggctggagtccaatatttgcagatgtaccggttatcgggagattgaagaagcggttaaatccgttttacgtatagggaaagggactcattagtccgtaaccgtaaaaaaaagagcccagagaatcatctctgaactccatattcttcacttcatataccgatactcccgcagtttctccaaaatcgccacttctttcatcagttcttcaccgacgtttgtttcttttactttcttccgctccagctctttgtcgactaatcgtttcactgttaagacgtcggttccggtgctcagcacttcggccttggagttaaagtgtttatgggcgacgagctgcataccgtatgagttgtataagagcgtgtagccggcgatgcctgttgtggattggtaggctttggagaagccgccgtcgatgacgatcatttttccgtttgccttgatcggatcttcgccttcgatttcttttaccggtgtatggccgttgatgatatggccgtgatccggattgaggccgaattccttcaggatgtttcggcaggttgcctcgtcttcacgcaaatagtaatacgggtttttcttttctttatgcgtttccttctctttaatgaaataccgctcaaaggttgtcatggcccgttttccgaagagggaggagtattcgcctgtccataagtaccacgtcatatctgtcgccagatcatcggtttcttccggatgggcaaacgcttcccgtaagaaccgttcaaatacatcgagcagctcacggcccgcataagctttatcctctatcatcatcgtttccatgctgccgttttcatcgacgggaatacagccgtgaatcaacaggttgccgttatatttcagatacaggctgcctttttcatcataaaattcatatggcggcccagcttttcggagtgctggacagaaaacagcagcttgtccatgacttctgcttcttcttctagcagctcgtcaggctgtttgggattcaccgtcgcaaagcaggtgttttccagttgatacgtttttccgttcagcgtgatttcattgcggtcataatcgatcttttccagtaacagccgttcttccatattaaagttcggccgtctcttaataatcgggctctcaagcttgaattggatcatcgcgatcgcctgatgaatttttgtgatttgtttaatctcatcttccggtctgttttcgtccgctttcgggcggaaagacgggttatcatcgtaatatttttcggcaaggttcaatagcggtctcagattgatgccgtaaacgtcttcaataatatccagattgtcatagcgggcacagatgcggataatatttgccaggcatacttttgagccggaataagcgcctatccagagaacatcatgattcccccattgaatatccactgaatgatagttgatcagttcttccatgattttatccggctgcggtccgcggtcgtaaatatcgccgaccacatgcagatggtcgaccaccaatcgctgcgtgctgtaggcaagaccggtgatcagcttatcggcctggccgagcgcaatgatctgttctatgatttcggagtagtattgttccttgttggcggcttgttctgttttgtacagcagctcttcggaaatataagcaaattgggcgggcagtgctttgcgcaatttggatcgggtgtacttggaagaacaataagaaacgagcttaatcatccgatgaatcgtttctttataccactcgtttaatgcctctttcgtatcaaagccatgtttgatcagcttcagtttgtcttccgggtaatagaccaaagccgccaattcatcaatttctctatcgtaaatgacgccgttgaaaatatcgcggatcttctcttttactcttcctgaaccgttccgcagcacgtgctggaatgcctggtactccccgtgcagatcactgacgaaatgctcggttcctttcggcaggttcagtatcgctttcagattaatgatttccgtgaccactttttcttcacaatcgtatttttgtgcgagcagatctaaatatttggtttccaatctcgtccatcccctttttatttacgagcaattgtatgataaagtgaatttaaagtatgacataatgtttaaatgattagaccttatatgatagtaccgcataacgcctttttgagacaatgaaaacggaagatacggcgcttcaggcatcaaaaattggaccgggataacgctgtgagcgtatacccctgttgacaatgcattcaacttccattaaaataaaaagttagctgatagttatttctatcggaaactcaatacgtagcaggctatgattgctgtgggtcgcactacagcaggagcggcttctggagagaccgcgggttttccgcggcgccgaagggttcacaatctcaggcaaaaggacagaagagtaccgaatatgtatttgtcatgctgttgattgtcagcggcgcaaatataatttgatattcttatgaccatgagattggagggcatccaatctctttttttattggctttttttgctcgtcgttcactagagaggtaaggaggagtcagatgtggagcagcgagagctaaagagggacttatcgaatcggcacgtgcagctgatcgctattggcggcacgatcggtaccggattgtttttagggtccggtaaggcgattcagctggcgggtccttctatcatctttgcgtattttattgtaggtattgcgctttttttcgtcatgagggcgctgggagaactgctgttatctaaagcggggtaccaatcattaacggatatagccgaggcgtatttagggccgcgtgcagcgtttgtcaccggctggacttattggttttgctggattatgacggctatggcggatgtgatcgccgtcggtgtgtatgtgaaatattggtttgatattccgcagtggattccggcacttatctgtttgctcattttattagggcttaatctgttaacggttaagatttttggagaattggagttttggttcgccttaattaaggtagtcacgattctcgcgttaattgtcatcggggtggttctgctggtgattgggttcaaaacgcataccggaacggtttcagcggcgaatctgtgggagcacggcggcttgttcccgaacggattttcaggctttttgctttcatttcagatggtgatcttcgcctatgtcggtgtggaattagtgggtgtgtcggcggcggaaacgtcaaatccgaaaaaaaatattccgtccgcgatcaataaaattccattgcggattttatttttctacgtcggggcattgatcattcttttatgtattaacccgtggatgcagctgaatgcaacggaaagtccttttgtaaagaccttcagtctggtcggcattccgttagccgcgggaatcattaattttgtcgtattaacgtctgccgcttctgcttgtaacagcgggatgttttcaacaagccggattctgtataacttaagcaaaacgaaacaggcgccggcaagttttgcgaagctgaataaaaatcatgtgccgagccgcgcgttatggatatcggttattgtgctgtcagcgggcgctcttttaagcaaattgataccggaagcggcctttggcatcgtgacaaccatcagcgcgatctgtttcatttgggtgtggggcgtgattcttgtctgtcatatcagatacaggaaaacccgtccggacttacacgcaagctcgtctttcaaggcgccgtttgcgccgtttatcaattacgccgtgctggcgctgtttgccttcattctggtgattatgctgtttgcggatgcgacgcgcccggctttgctgctgacgccgctgtggtttattggattgtttcttatctatcgggcgagagggagaaagacagattgaattacttcagacggtgtactgccatgcagtatgccgttttaatataaaaaaagcgctatcctgccgtgtaagcagggtagcgctttttacattaattccggatcaaataatcaaatgcgcctaaagcggcagttgcacctgatcccatggagataatgatttggttgtacgggccgtctgtgcagtcccctgcggcaaataggccgggaacgcttgtcgcgccgctcttatcgacgatgatttcgccgatgcggttgcgttcgacggtttcgtctaaccattctgtattaggcacgagaccgatttggacgaatacaccttggagttcaacgtgtttttcttcgcctgtttcacggtcaacgaacgtaatgccgtttacgttttggtcgcctgtgatttctttcgtttgtgcatttttgtgcacagtgacgttcggcaggctgtaaagacgtttttgcaggacttcgtctgctttcagttcaggcgcgaactccagcacagtcacgtgattgacgatacctgcaaggtcaatcgccgcttcgattccggagtttccgccgccgataacggctacgtctttgccttcaaataatggtccgtcacagtgcgggcagtatgcaacacctttgtttttgaactcttgctcaccaggtacgttgacattgcgccagcgggcacctgttgaaaggatcactgttttacttttcagtacagcgccgttttcaagttcaagttcgaagaggtcttttttctcaaggcgtttcgcgcgctgaaggttcatgacgtcaatatcataatctttcacgtgctcttcaaggcttgcagcgagcttcggtccttcagtcgctttgacgctgatgaagttttcgatgctcatggtgtcgagtacctggccgccgaagcgttcagcgacgacaccggtgcggatgcctttacgcgccgtgtagatcgccgcgcttgcgccggcaggtccgccgccgacaacaagaacgtcaaacggctctttgtcggcaaactcagacgcatctgcgccgctgcccattttcgcgagaatctcttcgatggtcatacggccgctgccgaaagattcaccgtttaagaaaacagtcggaacagccatgatgtttttgctttctacttcttctttgaatgccgcgccgtcaatcattgtatgtgtgatattcgggttgagcacactcatcatgtttaatgcttggacgacatcagggcaattgtggcacgtcaggctgatataagactcaaagcggtattctccgctgatgttcttaatctggtcaatgaccttttgatcagccttaggcgctctgccgctgacttgaagcaatgccagcactaatgatgtaaattcgtggccgagaggaacaccggcgaatgtaacgcctgtgtcttctccggtacgattaacgctgaagctcggtgttctgtttaattcagttttttcaactgaaattttagatgacatggaagccagttcgtcaacgagagccagcatgtccttagaagtgtcatcgtcaccggcgcttactttgagaacaatgtcgttctcaattagctgcatgtattgatttaattgtgctttgatatttgcatcaagtaccaatggaatgcactccttagattttacctaccaaatcaaggctaggtgtaagtgtttcgccgccttcttcccatttagccgggcagacttcacctgggttttgacgaacgtattgagctgcttttactttgtttactaggttgcttgcgtcacggccgataccgcctgcattgatttcaactgtttggataacgccatcaggatcgatgatgaatgttccgcggtcagcaagaccagtttcttcgtcaagaacgtcgaagttgcgggagatcgtttgagatgggtcaccgatcattgcgtaagtgattttgccgattttttcagagctgtcatgccagcctttgtgtacgaagtgagtatctgtagaaacagagtatacttcaacacctaattctttcagtgcagcgtattgtccttgaagatcttcaagttcagtcgggcaaacgaaagagaaatccgctgggtagaagcagaaaacgctccattgacctttcaaatcttcgtttgttacatcgatgaattcaccgtttttgaaagcttttgcttcgaatggcagtacttcttttccgattaaagacataatatcttcctcctgaaatgtgatttgaaatatattaaaaagacaaagcattcactttatctttcaataataattctaattatatatagattattaaataacatttattttttgtcaagctatatggggtattattttctgctttttttgctttagacgttaaaaaacgcctggtataagcggtttggcgctgtttgtcatgtttagcgccgggcgaaagggggattctcaattggtgaatcgaaacagtaggaatcaacccctctatatggcagtataaaccaaagggggtatgatcatgcaaataaatcacattactttgtacagttgtgcgttggaggagacgaaacacttctatgaacgggtgttaggttttcctttaattgatgagtccggggattcgtttaccatcaaggcgggagaaagtgagttggaattcaggcgcgccgattctcactctcaaccgacgtatcattttgcgtttaacattccgaataatcgttttgatgaggcgaaggcgtggataaaggataaagtcgtttttcaaacggaagatggggaggatgaggtgtatttctcccatattcaggcgcgttccttttattttaaagatccgtccaacaatctggcggaattcatcgcgagagacacatcgccgccaagcgcggaacgtttttcgattgagtccgttctgaatatcggtgaggtgaatctgacggctgccgaggtggtatcgacggggaaggagctgcagcgtctcggcattccggtgagaaagcatgcgcctcttagtgaaaacgggtttcattttatgggtgattacaatgatggggcgtttttgcttttagggccgagcggccgccgctggattttttctgatcagcatgcggagttccatccgctgtctgtcattgtgaacgggacgatccgcattgaggctgacggagaaggcggcattgacatcaggcgggcacagccgtcataaaaaagcccgggctcaaaaggcccggacttggggacattatttataaacaacccgggtgctgcacatgatgtcgtgcagcgtttttttctctccgaaggcacccatgatgaatccgatataaagaatgagcttggatatgatataggcgaaagcgcgtccgaaggcctggccgatggaaatgcgtccgccatcttcattgacgaccttaaggccgagcaatgcttttcccagggtcccctgcatctttgaggctgtgagcaggctgaaatataagatgctgatcacaatagagctcacaagaatcggaatgacgccgaacaccagaaaagagatgttaaactgattttcggtcatgaaggggtcagccgccgcaacgcctgccgcaaataaaaaagagaccataaattgaatgataaaaatcggaattcctatgatgatttgatcaatgacgtaagccagaaaccgaatccaaaatcctgccggtctttccatgtatctttttctctcccttgctttaatctggaatattatacgtaatcattccggattttgcaatggagcttaagcttctgcgagcagcctctttccccatgccaagcgtcccatgatcagcccgaaagccagaagggcaaacatgatgccgcaccacatcagctgatggattcccaaatgtgaaataaaccagccgcccgccgccgttccgatggtgatgccgaggttggaaaaggagacaaacaggctgttgccgaattcgggcgcctcctttgcttccgcagtaagccatgtctggctgacaatgagaccgccggaatgaacggcgccccatacgaagacgaggacggccatcggcgcgaaagacgtcccaaacccgtatatgagcaagtaggcggctgtataaagaagcggaaacaggatgacggtctttttcatatttttatataacaaagcaccgaagacgaaattcccggctatcataatcaccccgaaactcatcagcatgaagctgacccatgtgccgatcatatgggacacccgcccgaggtactccgcaaaatagctgtagacagaaaacatggccgcaaagagacaggtgacggcagcgatattgagccacaaagccggtttgcgaagaatgccgagctggcttctgaaagacattttttctgtgaccggcatggatggcaaaaagagaagaatgcccgtgaacgcgatgagactgatgatagcgccgaataagaaggcggcttcaagagagagacgatccgccagataagacgtgaaaggcacgccgaacgcaaagccggcggtgatgcctgaaaagactttcgttacggcttttccggattggccggcggggacaagccgggccgcggccgcaagcgctacagaaaagaacaccgggtggcataaagccggaatgatccgaaacgccagcatgacactgaaatgcgccgtatacgcgtagaccgcatttgaaacggcaaacatcagcaccgctaaaagcagaatgtatttccggtttatacctgaagcaagcaaggtcaaaaacggtcccgacacagcgacgatgaacgcgaaaatactgacaagccaccccgcttttgaagcagaaatatgaaatctgtccgccacttgcggaagaacgccgataatgcccatctcggtcgtgataatcccgaaaacccctagtgccaaaaatagaatgaagatggagctgctttttttcattgttatgtatgcctccttttatttaactacatatatagaaaaatagatatgttagaacaaaaaaatccctcctttcatggttatagctggtgctggacatagtcagcaaaggctttaatttgtttttcatttcttctgtaataggtccactttccgattcgttcggattccagcaggccggctttttgcatcgtcagcaggtagctggagatgacggactgcgcaagccctgactttgcctgaatatcaccgacgcaaattccggtgcggaaactgagtccctgatcaagataaggtctttcatcaaaatggtcttccgggtgtttaagccacgtcataatatcacttcgtgttttgttagataacgctttatgaatcaatatcggttccataacgtttattatatctatttttctggatttgtaaattcgtttttgacaaaacattctcaaattaagtaaatatcgtgctaaaatataacatattatcagattaccggtaaaaaagccgggttattgtcaggaggatattcacatgaatcaaaagaaaaaaggtgcggttgcggtgaccttgctttccgctctgatgttttgtttattgccggtcctcgtctcgctttctccgcttgcagaaacggggccgaacgcgaatcgttttaattccgcgggcatgtgggccgccgtcggtcagatccttgttatatatgcggtcccgctcattatgtatattctcggtgttcgtggcatgaaaatcatcatggctgttttttgcgggatcgggcttatcatttgcgcggctgtcttgttggtggcgttattgaccgcaatttccttagggcaggagctgtctctttattacggtcttttcgtttggtcaggcgcggctttcatcgtcaatgtggtgtggtatattgccgcgtttcgatcatccccgaagcatcagcaggctatgtgacatttgttctataaatctaccgaaaatacaaatatttcataggatgattatggtatgatgaaagcggtatagcagtttttaatagaaacgggaggaactgacattgaaaaaaaagacagcttcattgcgaatgaaaacattggcggccggcgctgcggttgctgcggctttatctgtgggggcggtttctgatctgccgggggcaaaatggctgcatccggcggctgctcaagccgcggaaacggtatttaaacaaaatcatgcggcatccggtttcttggcgggacggtatgacgcgcaggcgatgtctccgacgatgttcaactggtcaagggaaagccggtttacaagcactgccgatggcgcgttaaaatgggaaaagaatgttccggccacccctcaaaacggtgcgggagccgcggttgacggggacggcacagtatttattcaatcaaaagacgggaagctgacggcgtatcatccggacggtactgtgaaatgggtgacggaaaacctcgggacgacctatacgctgactccggtgctcggaacaaacggtgtcatttatcttccttctcacgataaaaaactgtatttcatcgacaaagaaaccggaaacattttaacatcggttccgctgagcggagcgccgagttccgatgcggctatcggctctgacggcacgctgtatgtgtcgacgctggataactatatctatgcgattaaaccgacgtcgccatcgacatggacgcaaaagtggaaatttaaaacaaacggcgtggtcggctccgctcccgtgttagcatcaaacggcactctgtatacggcaacgtacaataatatcttttacgcgatcaattccggaacgggccaagtgaaatggtcaaaaacgacgtccaacgggtttaaaggttatccggttattgatagagacggcaccgtttacgccggaaaccaggacggcaacttatacgcctatacatcaacgggtgctgtaaagtggacgttcccgttaaacggtttctccagctcttcattagcgatcgaccataacggcaatgtgtatatcggttcgggaagcggcgagctgttttccatcagcaaaaccggtaatatgaactggtctttctatacggacgggcctgtgagaacggcgccgctgattgatgcggacggcaatgtgtacttcggttctgacgataaaaacgtctatgcggttgacgctgaggggaatgaaaaatggcgctatcaaacagacagcaatgtcatttcctccccggttctggctgaagacggcacgctctacgtcggcacttatacgaaactgctcgcattcggggcaaaaaaataataaaaaagaatccgcgcacgcggattcttttttttatttagaggcttgaatgaatacgcctttttcatgagagaattctttaaaaccgtacacaccgtgatatgaaccgatcccgctcgtattgacaccgccgaacggaaggttgacgtcagtgaaatgaacgacgacatcattgacagaagcattgccggacgtcgtatgctgcagaacataatcgatcagctcctgattatggctgaatacatacaaggcaagcggcttgtcccgttcagtgatgtaatcaacggcttcactgatatcttcgtaattcataatcggcagaatcggtgcgaagatttcttcctgcatgatcttcatatcaggcgtgacgtttgtcagcacggtcggagaaatcgtgcggtcatgagcatcgaatacgccgccgaacgccgtttttgcccctttttcaatggcatcatcatacagggctttgacacggttaaagttgcggtcattgacaatctgcgtgaatttgttgcggtcaaccgtatgatcatcctccataaaacctgcattgacaatggtctgcaggagatctgtaaaggtgtcctgtacatcttccttcataaggagatagtcaggggcgatacatgtttgccccgcattgacaaatttgccgacggcgatttttttcgccgcgtccatcaaatcatagccgctgtcgatgatcgtcgggctctttccgccaagctcaagcgtgacggacgacaaatgcttcgccgctgccgtcatgacgattttaccgacattcgtgcttccggtgaagaaaatgtggtcaaacggctggtcgagcagttctgtcgcgacatcgacctcaccttcaaaaatggcgacttcttcttcgtgaaatgcctcgcgaataactgtcgcggcgatatggctcgtctccatcgtaaaatcggacagcttcacaatcgcgctgtttcccgccgcaatggcagccgcaagcggagccatcgtcagcataaacggataattccatgggccgagaattaaggtaaggccttttggctcgtacattaatacgccgtcagcgtcggggctgacggatgagccgacgcgtttcggcgccatccaggtgtcgagattgttcatattatctttaatcgccttgatcgttccctgcgtttccgctcttttcacctcatgataaggcttgcggacgtcccgtctgatcgcctcgatgatttcttcttcatgtgcggtgacggcatctaaaaagcgctgaagcttttctctgcgctgcccggctgttgaagcacgcagcgttttttgattttttttctgaagcgcaaagacgcgtttgatgtctgcttttatatgctgatccatcggttttcctcctctggttgcttttttatttcttcagggcctattataatgtgatgtgtttttgcggcaaagacagcgtaaacgcatctatacgttaccgtacaaattgccgtgatctgtctaatgaaaggagtgtctcttatgccggattctatgacaaatgacatcaaacaagcgcttttggccatgcttggagagcgggatatccgccgtgtgaccatgaaggacatcgccgaacgggcgcacgtgagccgggggacactgtacctttattacgaagataaatatgcgattttagaggatatagaggaagaaatgaaagacgggctgagcgaagcgctgtatgattcgctgaagaataaagatgtgcttcatttacagggcggatggcaaaaagtgcatccgacactgtcttttgttgaccggcaccgggtgttttttcaaacgatgatggaccgtcataaaatgccgtattttcacgttcatgcttttttaaaagatgtgttccggcatgatgtgctgctgtcaccggtcaatgcggatttctcaccgactgaacaggatatgtacattcattaccgcgcgttatacacatatgccattgtgttgtactggctgaatgaggagcccggggcatccccggaagaaatcagcggacaggtgtgggatttgatttctcaaaaacggttttactggctgtttggccgccgggtgccggaacaagaagaaaaaaagcccgccgaccgccgggtgacaaggacgaggcaggccttgcaagaagccatgatcggcttaatggcggaaacaaaagagtacgcggcgatcacgatttccgatattgcccgtcaaagcaacctccgccgtgccactttttatgaccattacgccaacaaagaagcattgctgaaaacgatcatccatcaatcatgccgggatctgatcggattattgacggtaaaaggagatcctgccgactgttccgtggaagaagcggaagccgcgctcgtccggctcttttcggcgctgtccggcggccttccgctcgttcattttctgagagagggttcaggagtgcctgacgtcatcccggaaatgttcagagcgctgcaatcgttttatcttcatcagcctctgcacattcaggcgggcaaaaagctctatgcatactatgtcgcgtccatgctcgtcggtctgattcaatatcgtcttcatgaaggaaaagaccacgcgccggatatgctggcccgggagtttctgcagtttttggatgtgaagaagtatcgggtgattttgctgtgaggatgatgaaaaagaactcggccgaaaacaggccgggttcttttttgctgttttctttgagaagtgcagatatgaaagaaaccttccatatgacgcctgattagcattctgccgccaaacatgacaaatgtcatattcggggcatgatggctgctactacaaccgcgtcgggcgccccgttatacttgaggtcataatgaaaaagaagggacatgacattcatgatcaatcacgccgcaactcaaaaacaagcgtctttaaaaaagcaggttgccgcattttccggcgccgatacaaagcatagtatcattcagcttttcaacacgtttgtgccgttttttgccctttggtttcttgcttacttcagcctcaatgtctcctatcttctgaccctcgcctgtactgttatagcagcgggatttttgacaagaatctttattattttccacgactgctgccaccaatcctttttcaaacaaaagaagctgaaccggctgttcgggtttatttcaggtgtgctgacactgtttccgttccttcaatggcagcgaagccactccattcatcatgcgacaagcagcaacttagataaacggggcaccggcgatatttggatgatgaccgtcaaggaatataacgaagcgtcagcctggacaaaaatacgctacagactttatcgcaatccgtttattatgtttattctcggcccgatttacgtatttctgattaaaaaccgtttcaatgtaaaaggcgcccgccgcaaggagcgctggaacacctatttcacgaacgcggcgattgtcttattggctgctgcgacgtgcttgcttctcggctgggaaaactttttgcttgttcagggtccgattttccttatttcggggtcaatcggcgtctggctcttttatgttcagcacacgtttgaggattcttattttgaagccgatgagcattgggattatgtgcaggccgcggtagaaggaagctccttttacaagctgccgaagcttttgcaatggctgacgggcaatatcggctatcatcatgtccaccacttaagtccgaaggtgccgaactacaagctggaagccgctcatgagggacacgagcctttaaaaaacgtaccgaccattacgcttaaaacaagtcttgaatccatgaaattccgtctgtgggatgaggacgaaaagcagtttgtcaccttccgggaggcgcggaaaacatcggcgccccatccggtgccgaaagaacctttaaagaaaaatgcctgatacggcgcacggctctttctcttatcagaaagagccttctcttcatgcgtgagggtgcaatgaaggcggtgttttgataaagtgatggtagacacaagcagcagaaggtggaacaaagatgaagaagtattttaaatttcaaaaactgaacgggatttctccttatatatggacgatttttttcatcctgcctttttattttatttttaaaagctcttctaccttcgtcatcgtggccggcatcattttcacgctcgttttctttggcgcataccgctttgcatttgttgcaaaaggctggccgctttacttatgggcgcttcttctgatcggcatttcgaccggctcagccatgctgttcagttatatttatttcgccttctttattgcctacttcatcggccatatccgagacaaagttccattttacatcttatattacattcatatcatcagtgcggcggttgccgtcaacttcagccttgttctgaaaaaagaatggtttttgacacaaattccgtttatcgtcattacactgatcagtgccatcctgcttccgctcagcattcgaagcagaaaggcacgggagcgccttgaggagaaattagaatatgcaaatgagcgaattgccgatcttgtgaagctggaagaaaggcagcgcatcgcccgggaccttcacgatacacttggacaaaagctctccttaatcggactgaaaagcgaccttgcccgaaagctgatatataaggaccctgaacaggcccgcgctgagctgaaaagcgtgcagcagacggcccgcacttccttaaatgaggtcagacaaatcgtctcatcgatgaaaggcatccgattgaaggatgagctcggcaatgttcggcaaattcttgaagcggcaggaattgaatttgtgtatgaagaaaaagaagcgcccaaacatatctctttgctgaacgaaaacatcgtcagcatgtgcattaaagaagccgtcaccaatgtcgtgaaacacagcggcgccaaagtatgccgcatcaccattcagcagctttggaaagaggttgtcattacggtagaagatgacggaagctttcaatgcagagaagaccgctttttttcaaaggggcacggcctgcttggaatgagggaacgtcttgaattcgcaaacggcagtttagccatcgatacagccgccggaacaaagctgaccatgagaatcccgaatgattcaaaatcaaaagaaaaggatggtagcagatgatcaacatcttcattgccgaggatcagcaaatgctgctcggcgcactcggttcgctgttgaatttagaagaggatatgacggttgtcggcaaaggcacaagcggccaggatgccatcgatttcgtggaaaaacatgcgcccgacatctgtctgatggatatcgaaatgcccgggaaatcaggtcttgaagcggcagaagaactcaaggacagcggtgtgaaaatcatcattttgacgacctttgcccgctccggctattttcagcgggcgctaaaagcaggcgtcagcgggtacatgctcaaggacagcccgagcgatgagctcgtcagcgccatccgcagcgtcatgaaagggagacgcgtctatgcacctgaattaatggaggacatttatagtgaagaaaacccgctgaccgaacgggaaaaagaggtgctcgagcttgtcgcagacggaaaaaacacgaaagaaatcgcaaacgccctcagcatcaaaagcggcacagtccgcaattacgtttcgatgattctggataaactagaagtgaaaaatcgaattgaagccattacccgatcaaaggaaaagggctggtttaagtaacccgccctcagcttgttcagccagtgttttttttacactggctttttttattatctatcgtcactccgtctcttccttccacttcttatcaatcagcattttccccggccaagtgtatgccatgatgccgccgtctgcggtgatgtcttctcccgtgacgtaagagctgtcgtctgaagcgaggaagagcgcgacagccgccatttcttccggttttccgagccggccgagcggcgtgatccatttgttggcttcacggaacgcctcgcccatttcgtcttctttcgtgcctgccaatttatcaatgagcggcgtttcaattgtacccggcgataaggaattgacgcggattccgcttctggcgtaatcaatggccatcgctctcgtcaggttcgtgattccgccttttgcggcgttatagccggaacggtcaaggtctgcggcccggccggacatggaggaggtgttgatgatggagcctcctttttcgagcatgagcggaatcaggtatttgctgcacagaaatgtgccgcgcagatcgacggcgatgatccggtcaaacaggtcgaccgggtattcatggacattgccgccctcttggtcaacaccggcattgttaaacagaatatcaattgttccgtacttttgctgaatgccgtctgcaaaagactttacgttttcttcatctgatacatcaaggtgaaaggcttctgcttctccgccgttttttctgatggcgctgacggtttcattcagttcgctttcattgatgtcaccgcagatcacgcgggcgccttcatcggcgaaaacccgtgccgtcgcttgtccgatgcctgtcgcggcccctgtgatgattgcggttttgtctgttaatcttcccatattgcgattcctcctttttctatacctgttcccgctgaatagggggataaacatacggaggtttgtttctaattacctattaaatatgttaatattatgtatatacatcattgggaggtttacatattttgaagatacagcataagaaggagatagcgttttattgttatgccattgttcctatgggatttgtgatctacaccgttatctctattctgtttcaggacatcacgtttcctctcactgtaagaaatgttctgcatgagtctttgcgaaacttgggatctcttatcttatttagtttgtttttctacccgtcatacatatggatgaagaaggaattcggccgccggaaagaagcagagaggagaggatgatcaacattctctcttttttattgataaaatgggtgaaatgaatccattaacatgttaaatttacaatatatgcatctgctaatcctagttgacaattgtcactgtatatgataaatagatgctgaaaagattttacataacatcaaagcataattaaaggagagatctgaagtgcggaaaaaaaagtttaaagcagaatccaagcgattgctggacatgatgattaactccatttacacgcagaaggaaatttttctccgcgagttaatttccaacgcgagcgatgcgattgacaaaatctattacaaggcgttaaccgatgattcattaacgtttgatcaagacaattactatataaaagtgacggcggacaaagaagcgagaacgcttaccgtcacagataccggtatcgggatgacaaaagacgagcttgaacagaatctcggcacgattgcgaaaagcggttcactcgctttcaagcaagaaaatgactcgaaagacggccatgacattatcggccagttcggcgtcgggttttatgcggcgtttatggtggctgataaagtcacggtgaaaagtaaggcgctcggcagtgacgaggcgtatgtatgggagtcggaaggggccgccggctacacgatcgcgccgtgtgacaaggaaaccgtcggtacggaaatcaccctgaaaataaaagaaaacacagaagatgaaagctatgatgagtttttagaaaactaccgcatcaaagcgatcgtgaaaaagtactctgattttatccgctacccgatcaaaatggaagagacggtcaacaagccgaaagagggcagcgagaacgaatttgaagaagttcaggaagaacagacggtcaacagcatggttccgatctggagaaaaaacaaaagcgagctgacggatgaggattacgaggctttttacgccgagaagcattacggttttgataaaccgctgacccacgtgcatatcagcgtcgatggagcggtgcgctacaattcgattttgtttattccggaaaacatgccgtttgactattatacgaaggaattcgaaaaaggattggagctgtattccaacggcgtgctgatcatgaacaaatgcgccgacctgcttccggatcatttcagctttgtaaaaggcatggtggattctgaggatctgtcgctgaacatttccagagagatgctgcagcacgaccgccagctgaagctgattgcgaaaaacatcaataaaaaaatcaaagccgagctgaagagcttgctgaagaacaaaagggaaaaatacgaatctttctatgaatctttcggcagacagctgaaattcggcgtctataatgatttcggcgcgaataaagacgtcttaaaagatctgcttctcttctattcatctaaggagaaaaagctcgtcactctggacgaatatgtgtccagaatgcctgaggatcaaaaatatatctattacgcgtccggcgattcatatgagcggattgaaaagctgccgcaaactgaaatggtggcggacaaaggctacgaaattttatatttcacggaagatattgatgaattcgcgatcaaaatgctgacaagctacgaggaaaaagagttcaaatccgtctcaagcgccgacttaggcatcgacagtgacgaagatgataagcagactgaagccgaagaaaacgaatataaagacctgttcgaaagcatgaaagagattcttgcggataaagtcaagaatgtcagagcctcaaaacgcttaaaatctcatccggtctgctttgcgacagacggcgaagtgacgatcgaaatggagaaagtgttaaacgccatgcctgacagccagcaggtcaaagcggaaaaagtgctggaaatcaacccgaatcacgaagtgtttgagacgttaaagaacgcgcacggacaagatcgggaaaagcttgctttatacacaaacctgctgtacaatcaggcgcttctgattgaagggctgccgatccatgatccggtcgagtttacgaatgatatctgcaaagtcatggtatgacgccaaaaaggaatcgcccagcggggcgattccttttttgattacagtgtgcgctgtttaagaatttgattttgtttgctgcgcttctttaaggagaaccgttttttcaagtgcgtttcgatttcttctaaacttttgcccttcgtttcaggaacgatgtaagcggcaaagaagaaggatgtaaggcagatgactgagaatattccgaacacccagccgatgcccattgcgctcagcataagcggaaataccagcgaaacgatcaggttggttgccgacagaatcaatgtcgtaaatccggttgcggctccgcgtgcgtttgacgggaacagctccggcatcagaacccatacgacgggaccccatgtcgcctgataaaagacgatatagattccgagaaacagcacggtcagccaagctgttgaagctgacaggccggccagaaggagaatggctgatagtgacgccaggctcaaggtaatgccgacacttccccacatcagcagttttttccggccgatccggtcaattaagatcatggcggtgatacacatgatgacgtttaagacaccgatgcccatcgtgccgagaacggacgccgaagtgccgagtccggcctttgtaaagatggtcggcgcatagtaaatcaccgtgttgataccgaccgcctgctggaagatggcgaggccgatcccgatcagcagcataggacggatccattttgctttcagcaagccgagcgtagattcttttttctcggcttctccttgtttcatttccgccaattcaacggcgatatcctctttgtcgtgagtcatttccatgacttgtctggcttcctgctcacggccgcgtttgacgagccatctcggagattccggcataaacgcgattccgattaataaaagcgccgccggtactgccgcgagaccgaccatccagcgccaagcttcaaacggggtgaatatgtaattcacaatatatgcgagtaaaattccggttacaatcattaagttattcaatgtgccgagcgttccgcgtatttttgtcggcgccatctcagatagataaacgggaaccagcgccgttgagcctccgacggctaacccgagtatgacacgggagataatcagcatggtgacggtttgcgaagccgcacaggcaagcgcgccgataataaaaatgagtgaaaggacgaaaaccacttttctccggccccatcggtcagagcatgtcccgcttaaggcggacccgaaaatcgcaccgagcagcagcatgctgacgaccaatccctcggtcagcgtgtttaaaggaatatcattgttaataaataacaaagcccctgaaatcacaccggtgtcatagccgtaaagcagcccgcccaatgctccgaaaaagtaaatcaggtattttttggtgtttttcttcacagatgatcctcctcatcttttggaacgcataatagtttatttagataactatttcattccccgaagagaaaaatataaacataaaaaaacacgccctttcaaaaaggcgtgttatttttcttaggaaaacagcttgtcaataaacgcgatttcttcagcagatagcgtaatggaggctgctttcatgttgtcttttaattgatccgcgcgtttggcgcccggaatcaggatatcgatttcaggtctcgccaagtaccaggcaagcacgatatgcgccgtatcggcattgtgcttttcagcaatcggtttgagctggttgacttttttgatgttttctttaaactgctccccttggaaatgcgcctgatcattgcgcaggtcgccttccgggaaggttgtgttctcgtcgtatttgccggccagcagtccggatacgagcgggaagtacggaatgaatgagatgccgtgttctgtcgtataagggaagaaagtcttttccgcctcacggttcagcaggttgtattctccttgaatcacgtcgactaagccgtctttattagcttctttcagctgctccaaagagaaattggatacgccgatggaacggatttttccttcttttttcagctcattcaatgcttgaacggcttcgtccttcggtgtatgctcatccgggaaatggatgtagaataaatcgatgtaatccgtctgcagccgtttcaggctgtcttcaaccgattgtttcaaaaaggccggtgagttgtcgaaaacaaagtcattgccttcttttctatgagcggcttttgtggcgatgaagacatcctcgcggttatattctttcagcacctcgccgatcaattcttcagaacggcccacaccgtaaatataggcggtatctaacatggtaacgccgcttttaatcgcttcccggaccaattcttttcccgtttcttcattcagattcggatagagattgtgtccgccgaccgcatttgttcccaaaccgatcggaaatacctttaggtcagttttgccgattgttactttgctcatgttttcgccccctgaaaaaattggatatcatagcgcctgccgggaaaatacggcagcgttctctattaactataacgctatgccaagtgaatgtcgatttggtgctcttggcaatacttcgtatattcctcatcgagctgctgagaagtgacgatgctgtgaagccggtcaaaaggcgcgtatgtcaaaagcgtggatttgccgaatttggaatgatccgcgagcagatacacttcgttcgccttttcggaaattttctttttcacctcgtattccagtaagtcggaattcgtcaggccgtgggtgatcgttgtcccggtagcggacatgaacgccttgttaatgttgtatttattgagtgtgcccggatcatcaatgccgacaaacgaccttgtcttccgtttgtagttattgccgatgatgatcaggtcgatatttttcatggatgaagcggcgttaataatatcaaggctgttcgtcaacaccgttacattcttatccgggtcaagcgtctccagcatcgatttggtcgtcgtgccggaatcaataaatacaagatcgtgatcctcgataaaccgcgacgcatagcgggcgattttgattttttcatcctgatgttgaatggtgcggttctcaaaagggacgagcacagatttttctgctgacgtcacgccgccgtacacctttttgatcacccctttttccgcaagcttattaatatcgcgtctgaccgtgtttttagagacgttgaatacctcgcacagctcatccagcgaagtggctccgtgtttgagaatgtattcttccatctcctgaatccgcatcagtttcataaaaaaactccttctagaattcttaaagtaattaaaatatataataaacaccaagagttaatcaatagttacttaacaaatgataaaaaagagggttcccaccgtacgattcgacacggttctccaagttcctgttttcccgcttaaaaaaagtatgataaaaataatgaaaaaattttgattttttagattgacttgaaggtgtgttgggcttacaatgtaaccaagaaatgaccaaaatataacctgtaaaatcaaaagtgaaagatgtaaccgtttgctttatccggcacatgaccaacttttacatgaaaagattgggagtcaccatcattttagcatttgtaagcgtttaattcatgtcttttatatgtaaaagatgaatatattcatccgttattatccagctgaacaggatgtttactatttaaggaggcaatgagaatggcagagatcagaaaactgaaaaactacatcaatggtgaatgggttgaaagtaagacagatcaatatgaagacgttgtcaatccggctacaaaagaagtgatgtgccaggttccgatttctacgcgggaggatgtggaatacgccgtccgctcagcgtcagaagcgtttaaaacatggtcgaagacggcagtgccgcgccgtgcgagaattctatttaactatcagcagcttctccagcagaacaaagaagagcttgcccgtctgatcactttggaaaacggtaaaaacacgacagaagcactcggtgaagtgggacgcggaattgaaaacgtcgaattcgcagcaggcgcgccgtcactcatgatgggcgattcacttgcctctatcgccacagatgtagaggcggcgaattaccgctatccgatcggggtggtcggcggcatcgcaccgttcaacttcccgatgatggtcccgtgctggatgtttccgatggcgatttcgttaggaaacactttcattctgaagccttctgagcgcacgccgctgttaacggaaaaactggcagagctgtttgaacaggccggtctgccgaagggcgtcttcaatgtcgtgcacggcgcgcatgacgtcgtaaacggcattcttgagcatccggagattaaagccatctcattcgtcggttcaaaacctgtcggcgagtatgttttcaaaaaaggcagcgaacatttgaaacgcgtgcaggcgttaacgggcgcgaaaaaccatacgatcgtgttaaatgacgcccaccttgaagatacggtcacaaacattatcggcgcggcattcggttcggcaggagagcgctgcatggcatgcgcggttgtgacggttgaagagggaatcgccgatgagtttatggcgaaattacaggaaaaggccgcagacatcaagatcggaaacggactggatgacggcgtgttcttgggcccggtcatccgcgaggacaacaaaaaccgcacgcacagctatattgaaaaaggcatcgaagaaggagcgaaactgctttgtgacggccgtgaacatgtaacggaagacggctatttcgtcggaccgacgatttttgacaacgtgacgacggatatgacgatctggaaagatgagatctttgcgcctgttctgtcggtcatgcgtgtgaaaaatttaaaagaagcggttgacatcgccaaccagtctgaatttgcgaacggcgcctgcctgttcacgtcaaatgcgaacgcgatccgctacttccgtgagaatattgacgcgggaatgctcgggatcaaccttggcgtcccggcgccgatggcattcttcccgttctcgggctggaagtcttctttcttcggcacattgcacgcaaacggaaaagacagcgtcgacttctatacacgtaaaaaagtcgtgacggcacgatacccgtctcctgacttcaattgatcagacagccggcccggacggctttgtgattccgtccgggttttcttttaccatccattaaggaggaataaacatgagtcatttgctgcgcaaaccgcaggccgatgaaatttctcaaggcgtgaccatcatacatgacgtcacttcagccaattcagacctcaaatacgtcggatttaaagtcgttgatctcgctcccggctcaacctatacagaagatttgaaaaagacggagtgctgcatcgttgcggtaactggaaaagttaccgtcactgattatgatcagacatttgaaagcatcggcacccgtgaaagcgtatttgatagaaaaccgacggacagcgtttatgtgtccaatgaccgctcttttggaatcacagccgtcagcggggcgagggtcgcgctgtgctactctccgtccgaacaccagcttccgacaaagctgattaaagcggaagacaacggtgtggaacatcgcggcaagctggcaaacaaacgaaccgttcataacattctccccgattcagatccatcggcaaacagccttctcgttgttgaagtttacacggacagcggcaactggtcgagctacccgcctcataaacatgaccaagacaatctgccggctgaatcatttttagaagaaacctattaccatgaaacggacccgccgcagggatttgtcttccagcgtgtgtacacggacgaccgctcgattgacgagacgatgaccgcagaaaatgaaaacgttgtcatcgtgccggcgggctatcacccggttggtgttccggacgggtatacctcttactacatgaatgtaatggcgggaccgacacgaaaatggaagtttcataatgatccggcccatgaatggattctggaacgctgacaagtgaggagtggcagataacgatgaaatatacgtttaatgaagaaaaagagtttgatattgtcgcgatcggacgcgcgtgtattgatttgaacgcggcggaatacaaccggccgatggaagaaacgatgacgttttctaaatatgtcggcggctccccggcaaatattgcgatcggcagcgctaagctcggattaaaagccggttttatcggcaaaatcccggatgaccagcacggcagatttatcgtttcttatatgcaggaaaagggcgtcgatacgtcacaaatgaccgttgacagagaaggacgcaaagccgggctcgcttttacggaaattctcagtcctgaagagtgcagcattctgatgtaccgggatgacgtggcggatttgtatctagagccgtccgaagtcaatgaaggctacatcgcaaacgcgaaaatgctgctcgtatcaggtacggcgcttgcgaaaagcccgtcgcgcgaagccgtcttaaaagcggtgcaaatcgcaaaaaaacatgacgtaaaagtcgtgtttgagctcgactaccgtccgtatacatggcaatcggcagaagaaacagccgtgtactacacgctggcggcggaacaatccgatatcgtcatcggtacgcgtgacgaatttgacgtaatggaaaaccgcagcggcggaaataacgatgaaaccgtccgccatttgtttgcgcactccgccgaccttgtcgtcattaagcacggcgttgacggatcatacgcatacagcagatcgggagaagttttccgggcgcacgcctataaaacaaaggtgctgaagaccttcggagcgggtgattcctatgcgtcagctttcatctacggactggtcagcggccgggatattgaaacgtcgttaaaatacgggagcgcttccgcttccatcgtcgtcagcaaacacagctcctcagaagcaatgccggctgccggtgaaatcatcgaactgattgaagcgcagcacagtcttaacggtaaatagaacgtataaaaggtgggatcgtttgtgggtaagacaattcgcttaacgacagcacaagcgctgattcaattcttgaaccggcagtacattcatgttgacggaaaagaagagccgttcgttgagggcatcttcacgattttcggccatggaaatgtgttggggatcgggcaggcgctcgagcaggacgccgggcacctgaaagtctatcaaggcaaaaacgaacaaggcatggcgcatgccgcgatggcatacagcaagcagatgctgagaagaaaaatttacgcggtatcgacatcggtcggtccgggtgccgctaacttgacggctgccgcgggtacggcgctggccaatcatatcccggtgctgctgcttccggccgatacctttgcgacgaggcagcctgacccggtgcttcagcaggtggagcaggaatacagcgccgccgtcacgacaaacgatgcgttaaagcccgtgtcccgctattgggaccgcatcacccgccccgagcagctgatgagcagcttaatccgggcatttgaagtgatgacagatccggcaaaagcgggcccggcgaccatctgcatttctcaggatgtagagggagaagcatttgattttgatgaaagcttctttgaaaaacgtgttcattacattgatcggatgcagccgagcgagcgtgagctgaaaggcgccgcggagagaattaaggagagcagccgtcccgtcattttagtgggcggcggcgcgaagtactccggcgcgcgtgaggaattaatcgcgctttctgaaacatacggcattccgcttgtcgaaacgcaggccggcaagtcaacggttgaagccgattttgccaacaatctgggcggcatgggcatcacgggcacacttgccgcaaacaaagccgcccgccaggctgatctgatcatcggtgtcggcacacggtacacggactttgcgacatcctcgaaaacggcgtttgattttgacaaagcaaaatttttgaatatcaatgtcagccgcatgcaggcatacaaacttgacgcgtttcaggtcgtagccgatgcgaaagtgacgctcggcaggctgcacggcttattagacggatataaaagtgcattcggcacggcgattaaaggctggaaagatgaatggctggctgaacgggaccggctcggcaaggtcacttttacacgtgacgcgttcaagccggaaattaaaaaccatttctcacaggacgtgttaaacgagtatgccgacgcgctcgagactgagctgccgcaaacaacggcgctgttgaccatcaacgacacgattcctgaagacagcgtcgtcatcagttcggcgggatctcttccgggcgatctgcagcggctgtggcattccaacgtcccgaatacgtaccatctggagtacggctattcctgcatgggatatgaagtatcgggcacgctcggcctcaagctggctcatcccgacaaagaagtctattcactcgtcggcgacggaagctttctgatgctgcactcagagctgattaccgcgcttcaatataacaaaaaaatcaatgtcctgctctttgacaactccgggttcggctgtatcaacaacctgcagatggatcacgggagcggcagttatttctgcgagttccgcacagaggacaatcagattttaaacgttgattacgcgaaggtggcagagggctacggcgctaaaacatacagagccaatacggttgaagaactgaaagcggcgcttgaagatgcgaaaacgcaagaggtatccactttaattgaaatgaaggttctgccgaaaacgatgacggacggctatgacagctggtggcatgtcggcgtggcggaagtgtctgagcaggaaagcgttcagcgggcatacgaagcgaaagagatgaagctgaagtctgcgaagcagtactagaggggaggcatcacgatgggcaaacaaaatattttgtggggcatcgctcccattgggtggcgcaatgacgatatgccggagatcggagccgggaatacgctgcagcatttgttaagcgatattgttgtcgccggttttcaaggtacggaagtgggagggtttttccctgaaccctccgtcctcaataaggagctggctctccggaacttgcggattgcggggaaatggttcagcagctttatcattcaagacggtattgaaaaaacggctgaacaatttacagaacactgtgattatttgcagaaagtcggagcggatgccgccatcgtttctgaacagacgtacagtgtccagggcttggatattgatgtatttaagaaaaaaccgcacttctcaaatgaagaatgggatacactgtgccaaggcttgaaccgtctcgggaaaatcgctgacgaatacgggctggagctcacgtttcatcatcatctcggcacaggcgtccagacggcggaagaagttgaccggctgatggatggaacggacccgcggtatgtccatttactttatgataccggccatgcctatatctcagacggagactatatgacgattctcaacaagcatatggatcggatcagacacgttcatttcaaggacgcgcggtttgacattatggagcggtgcagacaggaaggcaagtcattcaggcagtcgtttttacagggcatttttacggtgcccggagacggatgcatcgattttaccgaagtgtaccaaacgctcgtccgtcatgattattcaggctggatcgtcattgaagccgaacaagacccggcagtcgccaatccgcttgagtacgcgctgattgcgagaaagtacatcgacagtgaactgcttgatcctgcaaattagagggggacttatatgaatagtgccaaggcggaatcagctttcagcaaacggaccatcgccgcagcattagcaaattacattgatgcaggttccatcgtggcaggatcagcgggtttatctatgtgggtcagctacttgaagctgtccgacagtcagatcggattgctcggcgccttcagcgcaaacgcgatatcagcggccatcggagcgctgctcggcgggtatttggctgataaggtcggccgaaaagctgtatacacaaacagtatgctcgtctacgctttaggaatttgtttggttttgtttggattcaactttcccatgctgttatgcggatacatgattatcgggatttctgtaggcgcggatattacggcttcatggaccattatcgcggaaaacgcccccgagaaaaaccgggcgaggcattgcggagtggcgcaggtggcgtgggccgccggagccgttgtggttctgctgttatccgttttggtcggtgacctcgggcttttaggaaataaaattgtctttgcgcatctattggtgatcgccctgatcacatatgtgataagaaagcgtttacctgagtcggatgcctggaaaaacagtgaagagcggcctgccgccgtgaaaaaaacatcttattttgacttgcttcagccgaaatttttcaagaacattttgtttttaatgggtgtgtttctcgtatggaatctcgccgcgggcgtcatgggattcttcatgccgtacatctaccagcaggtcggcggcgtatccgcaaatacggccaacattctgcagatggccctgtttatcttcaccgggctcggcgtcgcctgtatcttcatgccttttgcagatcaatatcggaaaacggtgttcggaatctgcgcctttatggctgttgtcggctggtcgctgtttttgctgccgtttcagggactcccgatgctgcttttgtttgttttagcgatcggcatcaataacggagccggccagcaggcgaactaccagctgtgggcaagcgagctgttcccgacagaacacagagcgtcagcacaagggctcatgttctttctcgtccgtatttcaatcggcatttggagtttatttgtgccggtcatcatgtcacaattcggcatcggttttatggccggtattctgctcatatgtgtgacggccagtatgatcatcgggcttgtcttcgcaccgaatacgtccggcaagtcgcttgaacagatacaggaggaactgtacggtgctcctcaggacggcagagagaaaagaaagacgagaaccattatttgattatcagaaggagtggcgatcaatgaatttacgtataggtgttatcggaaccggtgctatcggaaaagagcacatcaaccgcatcacaaataagctgtcgggcgcggaaattaccgctgtcacagatgtgaatcaggaggccgcgcagcagaccgttcagcatttcaatttgaacgcctcggtttatcctgatgacgacagccttctcgctgctgaaaatgtggatgccgtcttagtgacaagctggggcccggctcacgaatccagcgtgttgaaagcgattcagcacggcaagcacgtgttttgtgaaaagccgcttgcgacaacggcagaaggctgtatgcgcattgtcgaggaagaaatgaagacgggaaaacgattggtgcaggtaggtttcatgcgcagatatgacagcggttacgttcagctgaaagaagcgatcgacaaccgtgcggtcggcgagccgctgatgattcactgtgcgcaccgcaacccgacagtcgcatcgaattattcaacggacatggccgtcgtcgatacgctcgttcatgaaattgatgtcctccactggcttgtcaatgacgactatgaatccgtacaagtcatctatccgaagaaatcaaaaaatgcgctgccgcatctgaaagatccgcagatggtcatcatcgaaacaaaaggcggcatcgtcatcaatgcagaaatctatgtgaactgtaaatacggctatgacattcaatgtgaaatcgtcggggaagacggcgtcattaagcttccggaaccgtcaagcatcagcttgagaaaagaaggaaaattcagcaccgatattctgatggactggcagcgccgatttgcggctgcgtatgatgtggaaattcaggacttcattgattcgatccggaagaaaggcgaagtcagcggtccgacggcatgggacggttatattgccgcggtgacaacagacgcgtgcgtaaaagctcaggaatccggacagaaagagccagtggcgcttcaagagaaaccggcattctatcaatcatttacgactgtgaacaaataatagatcgggagtgaaaaaatgaaactggccttagatccatccatgtaccgcgatgatttaacattagaggaaatggtctataaaacggcggaactcggatacgaatatatcgaactgtccccgcgcgaggatttttgtcctttctataaatatccgaaagtcgattcagcaaaaatcaaacaattgaagcgccttttaaaggatacaggtgtgaagctgtcctcccttcttccgctttaccactgggcgggtcctgatgaagaccgccgccaggccgccgtgcgcaactggaaacgggcgatcgaaattgcggttgaacttgaagtggatttgatgaacagtgaattcagcggttcaaagtatgatccgttgacaagtgaagaaaaattcatcaaatccatggatgagctgctgcccgtctttgaaaaagaaggcgttaaactcaatcttcaagcccatccatacgattttatcgaaacgcacaaaggtgcgatggatatgatccgcgcgctcgataaggattggatcaatcttgtctactcgactgcgcatacgttcttctatgatgacggcaaaggcgatatcgaaaccatgtttgatgaagccggcgaccgcctcacacatgttttatttgcagatacttttaatcataaagcggcgcacggcctgcgttacatcgtcaatccgcctgatgcgaaagtaacggttcaccagcatctggacatcgggcaaggcgaggtcgattttgagacgattttcagaaagatgagagagatgaaattcgacggaattgcgacgaacgccgtgtttgcttgggtcggcgaaagagcggatgaatcaagccggaccacgcttaagaaattaaaggaagaactgggtatggcataagctgagtatggagttcggcggagcggggcaaaaaagcccttcagccggactcccttcatatcgaaaacgcggatgggagaggctgacatgaaactttgctttaatgaagcgactacgctggagaattcaaacctgaaacaggatttagaactgtgcgaaaagcacggctatgattatattgaaatccgcacaatggataagctgccggaatacttaaaagaccattcactggccgatctggcggaatattttcatacccatcatattaaaccgcttgccctgaacgccctggttttcttcaacaatcgtgatgagaagggttatagggagatcatttcggaattcaaaaaaatgatggaaacctgcaggacgctcggcgtgaaatatgtggtggccgtgccgcttgtgacagagcggaaaatcttgaaagaagaaatcaaaaagagcagcatagaggtgctgactgagctttcggacatcgcggagccgtacggcgtaaacattgcccttgaatttgtcggccacccgcaatgcacggtcaatacatttgaacaggcgtatgacatcgtgaacgctgtcggccgcgataatgtcggactggtgtttgacagcttccatttccacgcgatgggctccaatattgagagcttgaagcaggcggacggaaagaaaattttcatctatcatatcgacgatacagaagactttccgatcggctttttaacggatgaagaccgcgtctggcctgggcagggtgcgattgacttagacgcccatctgtcagcgttaaaagaaatcggattcaatgatgttgtctccgtagagctgttcagacctgaatattataagctgactgcggaggaaacgatcaaaacggcaaaggaaacaacggaagccgtcgtatcaaaatacttcatgaaggaggcgtgaacatggcttttgtcaccatgaaacatcttcttgcagaagcgaaacgggagcattatgcagtcggccaatttaatatcaacggcctccaatggacgaaggcgattctgcaagcggcgcaaaaggagcaatcgccggtcatcgccgcggcttccgatcgtctggtcggctatttaggcggatttaaaacgatttccgccatggtcggcgcgttaatggaagaaatggcgattaccgttcccgtcgtgctccatcttgatcacggaagcagtgcggaacgctgcagacaggccattgacgccggattcagctcagtgatgattgacggctcccatcagccgattgacgagaatatcgcgatgacaaaagaagtcaccgattatgccgcaaagcacggcgtctcagtagaagccgaagtcggcacggtcggcggcatggaagacggacttgtcggcggggtctgttatgccgatatcatggaatgtgaacggatcgtgaaagaaaccaatatcgacgcgctggcggccgccctcggctccgtccacggcaaatatcagggcgagccgaatctcggatttaaagaaatggcggctatctcccgcatgactgatattcccctcgttctccacggagcatccgggattcctcaggatcagatcaaaaaagccatcacgctcggccacgcgaaaatcaatatcaacacggaatgtatggtagcctggacagacgaaacacgccgcatgtttcaggaaaacggcgatctgtacgaaccgcgcggctacatgacacccggccttgaagccgtggaagagacggtgcgaagcaaaatgagagagttcggatcagccggtaaagccgtaaaacagcagatcggctgatgaaaacggaaaccgccaagatggcggtttttttgtgcggtgttgcgtccgtacgcccgaaacgattatgatgatggcagcagtgtaagaaacgggagtggttcagtttgaataaaatcatgattgtggaagatagtgaagacattcgcggactattgcagaattaccttgaaaaatacggatatcaaaccgtggccgccgcggatttcacggctgttcttgatgtctttttgcgggaaaagcctgatgtggtgctgcttgatatcaacctgccgtcttatgacggctattattggtgccgccagatccgccagcattctacaagcccgatcattttcatctcagccagaagcggggaaatggatcaggtgatggcgattgaaaacggcggagatgattatatcgaaaaaccgttttcttatgatattgtgctggcgaaaatcaaaagccagatccgcagggcatacggagagtacgccgccaagcagggagagaaagtggttgaatatgccggtgtgcagctctttgtggaacggtttgaactgcgctttcaggacgaaaaaagcgagctttctaaaaaagaaagcaagcttttggaagtgctgctggagcggggagaaaaggtgacgggaagagaccggctcatggaaaaaacgtgggacaccgacattttcgtcgatgataatacgcttaacgtgtatatcacgcggctcagaaaaaaactgcgggagctgaacgcgcctgtttccattgaatcggtgcggggcgaaggctaccagctgagggcgctgtcatgaagctgtttctccggtctcatgccgtgctgattctgctttttctccttcaagggctgtttgtcttcttttattactggtttgcgggtcttcattctttttcccacctgttttacatattgggcgtgcagcttcttattttggcggggtatcttgcctatcgctggtacaaagaccgcggtgtgtatcattggctcagctcggagcaggaagggacggacatcccgtatctcggttcttcagtgttctgttcagagctgtatgaaaagcagatggagctgacccggctgcagcaccagaagctctacgagaccgaagccaagctcgacgcgcgggtgacgtatatgaatcaatgggtgcaccaagtaaaaacgccgctgtcggtcattaatttaatcattcaggaagaggatgagcccgtctttgaacaaatcaaaaaagaggtccggcagattgaattcgggctggagacgctcctttattcatcaaggcttgacctgtttgagcgggattttaaagtcgaagcggtttccttatcagagcttctccaatcggtcattcaaagctataaacgattttttattcaataccgcgtctatccgaaaatggatattcgcgatgatcatcagatttacaccgatgccaaatggctcaaatttgcgatcggccaagtcgtcacaaatgcggtcaaatattcggcaggcaagagtgacagactggagctgaatgtcttccgcgatgaagacaggacgatgcttgaagtcaaagattacggtgtcggcattccctcgcaagatatcaagcgggtgtttgacccttattacaccggcgaaaacgggcggcgtttccaagaatctacgggaatcggcctccatctcgtcaaagaaattacgggcaagctcaatcatacggtggacatcagctcgtcccccggtgaagggacatcggtccgattttcatttcttacaaaaatgtaagactgcgttaagaaaacaacatagctcattctgtttccccttgataacatggatttacgtcaaggggatttttatgctgaatgccccggcactacatgaaagcagcccagatcaacaagaataaaaccataaggaggattctcatggcgaatatgcttgaagtcaaacatataaataaaacctataaaggacaagtatcctatcaagctttaaaacaaatttcattttcaatagaagaaggcgggttcacggcggtgatgggaccgtccggctccggaaaaacaacacttttgaatatcatttcaacgatcgaccggccggattcaggcgatatcctgattcacggagaaaacccgcaccggctgaagcggacaaagctcgctcatttccgccgcaagcagctcggatttgtgtttcaggatttcaatcttctggacacgctgacaatcggtgaaaatatcatgctgccgttaacgcttgaaaaagaagcgccgtctgtcatggaagaaaaactgcacggcatcgcgaaaaagctcggaatcgaggacctgctcaataaacggacgtttgaagtatccggcggacagcgccagcgggccgccatcgcaagagcggtcattcataagccgtcacttattctggccgatgaaccgacgggaaaccttgattccaaagcgtcaaaagatgtcatggaaacgatgcagagcctgaatcaggatgatcatgtcacggctttgatggtgacccacgatccggttgcggcaagctactgccgccgcgtcatctttataaaagacggcgaactgtttaatgagatttaccgcggggaaaaccgccaagtcttttatgagcagattcttgatgtgctgtctatgctggggggaaacgcaaatgacctttcttcagttcgcttataaaaacgtcacgagaaacaaaagggcctatcttgcattcttcttgagcagcgccttttccgttttgattttctttacctttgcgatgttcctgtttcatccggcactaaaggaaggctacctgaataacatcgccaaaaaaggcttaaccgccgcggaatggatgatctttgttttttctttcttatttgttctgtattcggttaacgcatttttgaaatcgagaaataaagaattcggtattctgctgatgcagggtattacgccggtgcagctgagaaagctcattacggcggaaaacatgatcatcggcgtcatgtcgatcgcagcggggattatcggaggcttcattttttcgaaaacgttctttacggtcggcgcttatattttagaaatggacgcgctgcctctgtacatgccttggaaagcgctcggcattacggccggcggatttctgctcttatttttccttttatcgcagttcacgatcctttttgtcagatcaaatacggtgatcaaattaataaagggcactgacaagatcaagccggagccgaagccgtccgtgcttctgtccttattcggcatcgcctgcctgtgcggcgggtacggcatggttctgaaaggcaatgtccacgggaccgagccgttcatcattttactgcttaccgtcatcggcacgtatttctttttcagccaaagcagcatctggattctgcgcgcgctgaagaagtggaaaaccttttatctgcgcgggaaaaatgttatttgggtttctgaccttgtctatcgtttaaaagacaacgcccgcctgttctttatcgtcagtattatttccgcggttgcctttacggcgacgggcgtgctcgcgatgtacaaatcgaccgtcggggcggaagagtccgcctatgagatggagtatttatctttcagcaataacccgaaagaacagactcatttgaaagatattgaccatgaactgaaaacacacggctttacgtataagaaagacaaaatagatgtttcctatgttcgctatcaggaaggagaaactgttccccctgtttatatgatcagcgaatcggatgtatcaacatacttccatgttaagctgaacggcctgaaacataatgaggctgtctatttcccgggcacgtatgaccgcaatttcaaaaacgacgcgccggatcagctgaagctgctgaaccaaaaaggcaagccgtctgaccaaaaactgacggtaaaagaagtcaaaaaaccgctgatttcattgaatgccatcatcgcggtgaacgatcaaacctttgatcagctgaaatcactcggtgagaaagcgtcattatacggctacagctatgatcattggaaagacagtcttgggatcagccaatccttgaaaaatgagatttacggcaactatatcgacgtgcattctgattttatggcaaaagccgggacgtactatgatacggtgcagctgccgagcctgagtttattcatcggcctgtttatcgcgatcgttttctttgtcgcggcagcgagtttcttatatttcaggctgttcaccgatttagatgaggaccgggagcgctaccgctcattggccaaaatcggtctgagtgagcgtgaaatggcacaaagcgtgacgatacaattggcgattctctttttctttcctttcgtcattgccgtcatgcatacgctgtttgctttgagaacattagcggtggaaggctattccgatgtagcggggccgctcagtctgaccatcggagggtttttcatctttcagcttctgttcttcctagcggtgcggacaagctatttgaaaaaaatgaacaagtaaggggagtgcacagatgaaaaaagcattggcaatcctggccgtcttagcagccgctgccgtcatatacggacttctcttttttcataatgatgttacagacagatttaatccgtttattcaccagcaagatgtttatgtacagattgatcgagatggcaaacatcttagcccgggcggtactgagtatacattagacggatataacgcatccgggaaaaaagaagaagtgacctttttcgccgggaaagaccttcggaagaacgcgtatttgaaggtgaaggcgaaaggaaagtatgtcgagacctgggaagaagtcagatttgaagatatgccgggctccgtacagtcaaaattaaagtgaacatgaaaaacggcacagtgtcatgactgtgccgctttttttattttttattttttattttcttcagcccgtttgatcagcatgtcggtgatgatatccatctgtttgctgacggcaatcgggtcatacggatagaaggtgttgaaatcgttgataaagacacggttgttctttacggcatcgagatttttccaaacggatgactctttcagacgctcaaatgttttgctttctccattcggattgtaatcggtaatgaacatataatcagccgcatattgagggatgacctcttgggaaacctgtttcatggcgcccgttttcatgatgtctttttcgattttggccggcgctttcaatccgagtgcgttataaacggcttggccgccgcggccggaattgtcattaaaaatccagatttcgcctttatccgtcgtttcataaaggccgactgtctcgtctttgccgatcacgtttttgaggcgcttttgatcggcttcagcctttttgttgaagtctgccataaagcttttggctttatccttcgccccggcaatgtcgccgaataggctgaccgtatctttcgtattctttgcggtgttaaaaggaatgacaatcgtcggtgcgattttcgatagtttctcgtattggtcatccttcatcagcacgattaaatcaggcttcagctgcatcactttctccacattgacgggattgccgatgtccgtggtgtttttcagctgttttttgataaacggatttttgaaagcccatgagcccgccccgacgacatttgcgtcaacggacagcagctcacccgcataaaagtcagtgacgatccgttttggatgtgcgggtatgtcaatatttccttttgttgattcatatgtacgcatgtctgtctttcctttgcctgatgccgatccgttgttttccttcgcgccgctgcaagcgcttaatgcgaaaacaagcagaagtgccaggccgatcagccatgattgtttcttcataatgatccccctatttcggtgataatgattatcattattaatatagcaggaagacgtcattccgtctatgttttttatagaaaaccttccttgattatccatgttatagtagtaaaggaggaggaatgaatgttgattacgaaaagagggacttggtgggaagtgctgcacagctggtggctgctgctgactttcgcgccgtttgggctgaccgctttcttggcctttttctatatcggctaccgggccaagaacaaaaaatggctgaaatacggacttatctattttattattttagcaattgcttttgtgctgccgagcacgccgggcgtgtatatcgtgctgcctttatgggtcatctccatcatccacgggctgaaagtgcgggcggcttatttaatacagcttgatgtgtttaaacaaaacgtcgaagcaagagcgtttgaagcggtaaggcatgaggcggaggaaaaattcggcggaaaacccgctcaacgcattgatctgacaaaacagagataaaaacaaatgacaaagccggtatctcgcgctttgtcatttgcatgaccggcctattgctggtatgaatgctgctgaaacggtgtgtgtgatgctgtgtttgcgggaatgaagaaacattagcgtttgccatcggtgcaggcatgtgtccgcttacttcctgctgaagctgattgcacacattcacgatttgctggcatttctgaatggccagttcatgcccctgcagcgcttgctgaatggtatgaacggcatgctgttcatggttaagcatctgctgaagcatttgaatgttttgctgttcctgctggagcatttgcttgtactgctgactgctttgctgtgtctgctgaataagctgctgtgctgtttgacggcattgctgcagctgatttccgctgtattggttttgatacatcatgaagacctcctgaagtgattgattttacacatttatcatgtgaaagaataggagaggcattcatgcaagaaaaggattcaaatatttacctgttatgtacagagcggaatacaaggctcgggatggcctgtcgagctttgtattccggccctttttctcagaagccgccttctgtagcgtgaaaaggaatattgagtctgttttcgactgcgcgcaggcgctgattcaaacggtttaagcggcgggtatggatttcaatggactggctcagccgtctgatctgctcattcatacgcgtgatttcccggttttggcgctggtcttcttgtgagaggcgggtgagctctctcgtttgctgggcgttttgtctttcaagctgggcgactctccgttctaaagccgtcggctgccgctcttcagactgagggggcgcataataatagctttcctgctgctgatacggctcatactcaacggggctcacttcgtattcctgctgctgagggaaataggcagatggggtgtagtactgatatgggttcattcatcattctccttatctagtgaagtctttatacactatgtagtcaattgcacagtgccacggcatccgcctaacttacaggcgtaaaaagagcttcaaaggaaggtgatcatgttgcggaacatacggattttcatcatgacggttcttgttatcggatgcgtcatgataacaggctgctcgcaaaagaaagcagacgaaccccctttttattacgggacatgggatgcggggctgaaaccgggcccgatggacggggtcagatctgaaaccgttacgtttacgaaagacagcgtgctgacaaagcaggtcattaaaggccgcggcgaggttcccatgccctcagatgcttacaaggtggtctcacaaaacacggacgggacgatcgagattgaatacctcggacatccgcaccccgtcaaaagcacgttgaaaagaggaaaaaacgatacgctcatttggaagatatacggagaaacaaaaacaatgacaagaataaaaaccggcggggaggatgcacatgagaaataaggctgccgacagactcgttttgacgggtgtcatcgtacatatcattcaatggttttcactgttatggttattttttatgctttttgatcagttcgggcgttttaccatttataatcccaatgtcgtcaacggcagcatgcagtctttttcattctttgatatgatgcgcgctcttctgttttccggcacgctgcggaatacgctcctgctgtttctgtttgcggcgatgctcatttacttgtgggtgaacgctctgtttatcctgctggaaatcgtttcttatatcatgatcaggcggaacagccgttcattatgggcatactttcccgcagcgatgggaataaagcttgcccttctggacatagcggccgtccctttctttgcggcggggctgatgctcttgaagcagaaaacagatgacagcggcgaacaagctgacaaggggaaaagacggccccgcatccggaggcaggcccggtataggaagagaaggcggagaaacttgtccgtttgatttttcattgaaacgaaaaaacgatatgatgaaagcataagcagaaaaggatacaaaggagatgcaggatgtacaagttaatcgcaatagatatggacggaacactattaaacgatcatcatgaagtgacggctgaagtccgcggggcgcttgatgccgccaaagcggaaggggtcaatatcgtcctgtgcacgggccggccgatcggcggcgtgcgtcggtatttggaagagctgaacttacaggaagaaggagactttgtgattgcctataacggcgcactcgtccaaaatacgtatacaaacggtgtcgtggccgagcagtcattaggctttgaagatttggagtcgctttacgagctgagcttacagttggatactccgatgcattactttgacacagccaatctgtacacgccgaaccgggatatcagtgaatacacggtatacgaatcatacattacgaaagtgccgcttcatttccgcacgatcgatgaagtgccgaaggatattctgattccgaaagtcatgttcattgacgatccggacaagctggagaaagcgatcgcttctattccggaatcattcagggaaacatacacaatggtcaaaagcgcgccattcttccatgagattcttcacccgaaagtcagtaaaggaaacgcggtcaagctgctggccgaaaaactcggcattgaacagaaagacgtcatggcaatcggcgataacggcaacgacatgtccatgattcagtgggccggctgcggtgtggcaatggccaatgccatcccggaagtaagggagattgctgattatgaaacgaaatcaaataacgaacacggcgtggcgcacgcgattcaggagcttgtgctgaaaaaataggcaccccatcagagggtgcttttttaccgcgtgttttggtgatatgataagcggagaggggaggcgcgacatggatcgtgaaaaacagcagctcagcatagaagcggcaaaactatattatcaatcagattacagccagcagcagatcgccgaacggcttaatctgtcacgccccaccgtttcaaggctgcttcagtacgcaaaggaaaaagggtatgtgcaaattcgcgtcatggacccgtttgaggatctggatgaactcggcgcgaagctggaagaaaaatacgggctgcttgaggcgcacgtcgtcttttctccaagcgacgattaccaggccattacacattacttaagccgctatggcgcagactatatgcataaaaccgtaaaggacggcgatatactcggcgtaagctgggggacgacgatgtaccagatcgcaagccgcatggagccgaagcaggtaaagagcgttgaagtcgtgcagctgaaaggcggcatcagtcattccaatgtcaatacgtattcgtcagaaacgattcagctgttcgccgaagcatttcagaccatgccgaggtatttgccgctgccggttatatttgacagcgccgatgtgaaacagatggtcgagcgggacagacatattaagcggatcattgaaatgggcagacaagccaatatcgccctgtttacggtcggaaccgtccgggatgaggcgctgcttttcagactcggctatttccgggaagaagagaaacaattgctgaaagcacgcggagtcggcgatatttgttcgcgcttttttgacgaggaaggcaggatttgcagcagcagcattaacggcaggacgatcggagttgagctcagcgacctgaaattgaaagagcgttcgattctggtggcgggcggcagcagaaaatgcaaggccattcacggtgccctgaaaggaaagtacgccaacgttttgattactgatcagcatacggccaaaaaactcattcaagaattgtgacaattcatgaacataatttcaattaccaatttacatatgttcaaaattcggttattctaaacgtatcctaggaaaaaggaagtgcatacaatgtcaattgcaagtcaaatagaccatactgctttgaaaccgcatacacaaaaagcggatattttacaactgataaaagaagcaaaagaatataaattcgcttccgtttgtgtgaacccgacttgggtcaaactcgcagcggaggaactgaaaggcacgggagttgacgtttgcaccgttatcggatttcctctcggcgcaacgacatcggaaacaaaagcatttgaaacgaaggatgccatctcaaaaggagccactgaggttgacatggtcatcaatatcggcgcattaaaagacggcgatgatggagcggttgaagctgatatccgcgcggtagttgaagcagctgataaaaaagcgctcgtcaaagtgatcatcgaaacatgccttttgacagatgaagaaaaagagcgtgcgtgccgcttggcggtatccgcaggcgctgatttcgtcaaaacgtctaccggtttttctacaggcggggcaacggctgaagatatcgctctcatgagaaaaacagtcggaccggacatcggggtcaaagcatcaggcggcatcagaacaaaagctgatgttgacagcatgatcgctgcgggcgcgagccggatcggcgcaagtgcgggcgtctctatcgtgagcggcggagacagcggcagcagcgactattaatcagcattgcggaagccgaaagcttccgccatcctctttctttgttgatgcataaaaaattgtaagcgaatacaaataaaaggagaacacatatgaagtatctcatcggaattatcggaatcattgtgtttttaggtcttgcctggcttgccagcaacggcaaaaaaagaatcagaatccggccgatcgccgtcatgctcgtgctgcagctgattctcggttatattctcctcaacaccggtatcgggaattttcttgtcggcggttttgcaaaaggatttaactacttgctggaatatgcatcagaagggattaactttgtattcggcgggcttgtgaatgcgaaacagacgacgttcttcatgagcgtgcttctgccgatcgtctttatatccgctttaatcggaattctgcagcattggaaggtccttcccttcatcacgaagtatatcggtcttgcgttaagcaaggtgaacggaatggggaaaatcgaatcttacaacgctgtcgcatccgcgattttagggcaatcagaagtctttatcagtttgaaaaaacagctcggctatcttactgaacagcgcttatacacgctttgcgcgtccgcaatgtcgacggtctcaatgtcgatcgtcggttcttacatgatgatgctgaagcctgaatacgtcgtgacggcgcttgtgctgaacttattcggcggatttatcatcgcttctatcatcaacccgtacaccgtcagcaaagaagaggatttgatcttcgttcctgaagaagaaaagcaatccttttttgaagtgctcggtgagtatataatggatggattcagagtcgccgtcgtcgtagcggcaatgctgatcggatttgtcgcactcattgccctggtcaacggcgtttttaacgcggtcttcggcattacattccaggcgctgctcggatatgtattcgcgccgtttgcgtttttaaccggtattccgtggaatgaagcggtgagcgccggaagcattatggcgacgaaaatggtatcgaatgaatttgtggcgatgcagacgctctcatccggcgatttccatttcagcgcgcatacacaggcagtggtatctgtattccttgtctcattcgcgaatttctcctctatcggaatcattaccggtgcggtgaaagggctgcatgaaaaacaaggaaacgtcgtcgcgcggttcgggctgaagctgctgtacggcgcaacgctcgtcagtttcctgacagcggcgatcgtcggattgattcactgaacataaatgaaggacaggtgatagatcatgagaatggtagatcttattgtaaaaaaacaaaatggaaaagaactgacaacagaagaaattcaatttttcgtaaaaggatacacggacggaagcatccctgattaccaggcaagcgcgctggctatggcgatttactttcaggatatgacggatcaggagcgcgccgatctgacaatggcgatggtcaattcaggggaaacgattgacctctccgccattgaaggcattaaggtcgacaagcactctacgggcggggttggcgacacgacaactctcgtactcgctccgctcgtcgcggcgctcggcgttcccgtcgctaaaatgtccggccgcggccttgggcatacggggggaaccattgataagctggaagcgatcgaaggcttccacgtggaattgtcaaaagatgaattcatcaagcttgtgaaccgcgacaaggtagccgtcatcggacaaagcggcaatttgacccctgccgataaaaagctgtatgcgctgcgtgatgtaacgggtacggtgaattccatcccgctgatcgcaagctcaattatgagtaaaaaaatcgccgccggagcagatgccatcgtgcttgacgtcaaaacgggagccggcgcgtttatgaaaacggatgaagacgccgtgaacctcgccaaagcaatggttcgcatcggaaacaacgtcggccgccagacgatggccgtgatttctgacatgtcgcagccgctcggttttgcgatcgggaatgctctggaagtgcaagaagccattgatacgttaagaggggaagggcctgaagacttaaacgaactcgtcctcacgctcggcagccaaatggtcgtattggcgaaaaaagctgagacattggaagaagcgagaacgaagcttcaggaagtcatgaaaaacggcaaagcgcttgaaaagttcaaagagttcctgagcaatcagggaggagacgcttctgtcgttgacgatccgtccaaacttccgcaggcggcgtacaaaattgacgttccggcaaaagaagcgggtgtcgtttcagaaatcgtcgctgacgaaatcggcgtcgcagcgatgctgttaggcgcgggacgtgcgacaaaagaggacgaaatcgaccttgccgtcggtattatgctccgcaaaaaagtcggtgacaacgtcgaaaaaggtgagccgctcgtcaccctttacgccaaccgcgaaaacgttgacgacgtgaccgccaaagtctatgacaacatccgcatctcagaaaaagcggaagcgccgaaactgattcatacgctgattacggaataagacaaaaaaggcacatacctcatcagtatgtgcctttttttttatggcatggttttatccaaatgaatgtcacggacggattgtttcggctgtttctttctcaaaaaacgaatgagatagcacaggatcatacaaggaattccgcagaagagggcgattctttgattgggatcaaatgcaaggcctacgcatgaagcgaaacataagatcacagcggcgatcggaacgagagggtataacggcgtgcggaaggtcagatccgcgacgcgtccgccgtttttcacataatgttttcgaaataacagctgagacagggcgatgctcatccacaccacgacgccggcaaatccggctattgccacgagcaccacgtagaccgtgcccggggcggcgatgcttgagatcaaggatatgcaggaaacggccatgctggcgagcagagcattcagcggaatgcctttcggcgtgacttttttgaaccgggcgctgatcatgttttcattcgcaagagaccacagcatccgggtggaagcatacagtccggagttggcgaccgaaagcaaagccgttaaaatcacgaagttcatgatatctgcggcgtatgggataccgatctgggaaaagaccgcgacaaacggactttcaatcacaccggcttccttccaggagatcagtccggacagcacaaaaatggcgccgataaaaaagatgaccgttctccaggcgacatttcggatcgaacgcggaatatcttttgccggattggcggtttcacccgctgtaattccgatcagctccgtccctgaaaaggcgaagcttacggaaatcattgcgatgaaaaccgcaagaaagccgttcggaaacagtccgccgtgtgaggtgaaattcgacagcatcggagcttcacccgaaccgtgcaatgaaatcaaaccgaacatcgcggcgccgcctaagatgataaataaaaggatggtgacgattttgacgctggaaaaccaaaactctgtttctgcaaacaatttaacggagaatgcattggcggcaaaaaggagagccgcgaaaatcgcgctccacatccagacgctgctgtggggaaaccagcgctgcatgaggataccggaagctgtaaactccgatcctaccgtcaccacccaattcacccaatacatgataccgaccataaaacccgtggacggcccgataaacgttgtcgcatacgtttgaaatgaaccggtcacaggcatggctactgacaattctccgagacactgcatgacaagatacatcatcaagccgccgatcaggtaagcggcgatcgtcccgcccggcccggcctggctcaatgtataccctgtgctcaaaaacagccccgtgccgatgacccctcccaatgaaatcataaataagtgcctgcttttcatcgtgcgctttagttgattgccgccttgatcaacatccatcgtgatctccccctttttgcgtggcatgagaatcttccggcagccgagatcacgcgtgccggatttgactttaacgtgacaatttaaatcccttcaatgcatgtaaaatgacgtgtgcggctgcccggcttgtcatatcgcgaaaatcaagtgtcggatcaacctcaacgatctcaatacccgagatgtcagcctcctgggctaaaaaccggaccgcctgaagcagttcctcggtatacaggcctccggggccgatcgcaggacagccgggcgcatgagcttgatccagcacatccatatcaaccgaaataaaaatggcgtcggctcttttttgaacggccggcaaagtgtcttgtatcgttcggagaagccctttctcccggatcatctccattgtatgcacgtctgcctgacgctcttttacatatttttcatatgccaggctgttgctgaactccctgattccaagctgaatcaggttttgtccgcttatgatattttcatctaacagacggcggaatggcgtgccgtttgtcggccctccgtcttctgtgttgcggacgtcgtggtgggcgtcgaattgaaagacggccgttgttcctttcgtttccgcaatggctttaatggtggaataactgatggagttgtcgccgccgagaatgacgggcacccagtcaggctggtccgtcagaatatcataaatggtccgataaatgtgttcgtgagatttgacgacatccgtgacgtgaatctgaatatcgccgatatcgtacagatggtcaatgacatgctcccgcagctccgcggaatatgcggaaatgccgccgagcgcccggcggatcgcaccgggggcaaagcaggcgccggaatggctgattgacgacttagaaagcggaacgccgatcaaagccggccctttgatcgtttgtcccgcccacgcttccgtcacatcgccgatccttgtcacatggcggtcgttgaagagggagccggctttttgcagaaacggatacttatccaagagcggctccctcccttgaaacgaccgtcttcccgttcttgatgacacggcggacatgattgacgccgtaatgatacgggatatacatgtaattcggcgcttcccaaatgacaatgtcagccgcccgtccggctttgatttgtccggcctcttcgccttttccgatcgcatacgcagcgttaacggtgacagcgtgccagatttcttctgcggtcatttttaaatgaagcgcggcaattgacataatgagctggagattttccgtcggtgagctgcccgggttgaagtcagtcgccaaactgacccgtacgcccgcatcaatcatctcccgggctctcgcataagtgtgttttccgagatagaaagtcgtgcccggcagcaggacggcgatcgttccggactccgcaagcttttcgatgccttcgtcagatgcccccaccaaatgatcggcagaaacagcatgcagctctgccgccaattccgcgccgccgagcgggtcaatctcatcagcatggattttcaggccgaaaccagcttcagccgcctttttcaggtagtcccgtgactggctgacggtaaagacgcctgtttctgtgaaaatatcggcaaattgcgcaaggcctttttcttttatgtcaggcaaaagctgcagcatgcgattcagaaattcgtcagggctgttccggtactcaggcggaatggcgtgtgctcccataaaggtcgtgacaaggtcgaccggctggcgctcacccagttttttcgccgcggtcagctgtttcagctccgtgtctttgtcgagtccgtacccgctttttacttccgcggtcgtgatgccgtatgacagcatgcgtccgaggtgaaaaagccctttttcaatcagttcttcttcggaggcggctttcgtgtctttgaccgttgacaaaataccgccgccttgcgccagaatatccaaataagacatgccctgaatttttaaattcagttctttttcgcgggaccctccgaatacaagatgggtgtggggatcgacgaggccgggggtgacgagccgtcccccgcagtcgataatgtctcctgcctcgtatcctttctccgctccttgatgtccggcaaaaacaatgcgcccgtcgtgaacgccgatgacggcattttccgtgacatgaagatcctgcatgctcccgccggatcgggggccgccggattccatcgtcagcagctggccgatgttggtgagtatggtatctatttgtttcggcatgttaccgctcctttttcatcggtatcataatgtcttgttcctcggcgacttgaaccgctttttcataacctgcgtccgcatggcggatgatgcccatacccggatcgcttgtcagaacgcgggaaagccgttgttccgcaaggatgctgccgtcagcgaccgcgaccattcccgcgtgaagggaataccccatgccgacgcccccgccgtggtgaaaagaaacccagcttgcgcctgaggccgtgttgatcagcgcgttcagcaccgcccaatcgccgaccgcgtcgcttccgtctttcatcgcttctgtttcccgattcggagaggcgacagatccgcagtctaaatggtctcttccgatgacgatcggggctttcagctcgccgtttctgaccaattcattgatggcgagccccatcttttcccgttcaccgtagccgagccagcaaatacgggacggcaggccttggaacgtgacttttttctgcgccatgtcaatccagcggtggagggcttgattttctggaaacagctcttttaataaagcgtccgtgcggtatatatcttcagggtcaccggacagcgcagcccagcggaacggcccttttccttcacaaaataaaggccggatgtaggccggaacgaatcccggaaaatcaaaagcatcggcgagaccctcatctttggcagcctggcggatgttgttgccgtaatcaaagacgatagccccttttttcttgaaggcgagcatggcttccacatgctttttcatactctgcttggaaagccttacgtataaatcaggctgatcccggcgcaggcggtcggcctcctcaagtgagtatcctgccggaatatagccgatcagcgggtcgtgagcggaagtctgatcggtcacgatgtcaatatggacgccgcggttcaaaagctcatgatgcacctctgccgcattgccgagaaggccgatcgataaaggttctccggcttgtctggctgtttcggcccagcgcagcgcttcgtcaattgatgcggttttccggtcgcaatagtttgtttctatccgtttatcaatccgtgtttcatccgcttcaacggcgatgacgacgccatcattcatcgtgacggacagcggctgggcgcctcccattccgccaagtccggccgtcagcgtaagggttcctttcagactgccgccgaaatgctgtctcgcaagctccgcaaaggtttcataggtgccttgcaaaataccttgtgaaccgatataaatccagctgccggcggtcatttgcccgtacatcatcagtccttttttctcaaggtcatggaaatgctcccaatccgcccatttcggcacgaggaccgaattagccagcaggacgcggggcgcgcggctgtgcgtgcggaacagtccgaccggttttccggattggatcagcagtgtttcatcatcttttaacgttttgagggagcgctcaatcgcgtgaaaagcatcccagtttcgcgcggccttgcctatgccgccgtatacgatcagatcctccggcttttcggcaacctccgggtcaaggttgtttcggagcatgcggagcacggcttcctgctcccatcctaagcattcaagttcggtgccgcggccggcgcggattgatttctttacatcagtcatcttgtaagtcctccttcattggtcatcagtttttggtgatgctcattcggcagaaaagactccttcttcagccagtcactcagatgttcgatgtcataagaaaacacgcggtcttcttgtatggacggcacgatgtttctcatttcgagatagagctgttttgtgtacgaggcgcaatgttccgcaccccggtattccacggcctgcagcgcgcaaatggcttcaacggcaagcacccgtctcgtattcgcgatgatctggtaggcgtgccttgaggcgatggttcccatgctgacgtgatcctcctggtttgccgatgaaggaatggaatcgacactggcgggatgggccagggttttattttctgacacgagggaggccgccgcatattgcatgatcatcgctccggattgtaagccgggctgagggctcagaaagggcggcaggtcattcagctgcggattcacaagccgttcgatacggcgttcagaaatattcgcaagctcggccgccgccactttgagaaaatccatggcaaaggcgatcggctgtccgtgaaagtttccgcctgagatgattttggcgccgtcttcgaaaatgagcgggttatctgtcgcggcattcatctcaatttctaatttttcttttacatacgctaatgtctgccatgatgcgccgtggacttgaggaatacagcggatcgaataggcgtcctggacacgcagctccccttggacggtcgtcagcttgctgtctgacaagtaatagcggattcgctctgcgacatccatctgttcctgatatccgcgggcggcatgaatgtcctcgtcgaacgcatcgataatgccctgaaggccttcgatcgttaagctcgcgatccgttccgactgataggccagcttttcggcctcgaggtaagcgatcagtcccatcgcggtcatggcctgcgttccgttgatcagcgcgagcccttccttagaggtcaggacggccggctgaaggtttgtcttttccaaagcatgagctgccggcatccgggccccttcgtaaaagacttcgccttgcccgataagcgccagtgcgagatgagaaagcggcgccaaatctccgctcgcccccagtgacccttgctgcgggatgaccgggtgaatgcgatgattgagaaacgcgagcagttgatcaatcagctcagtccgtacgccggaaaagcctttcagcagggcattggcgcgcaaaagcagcatggcccgcgatacagattccggaaacggatcaccgacgccgcacgcgtgagaaagaatcagattcagctgcagatccgcggcgtcttctttttgaatcagcacatcgctgaacttgccgaaccccgtcgtaatcccgtaaatggtcttctcttcttgaacgatccgttcaaccgccgccctgctttttttcacacgttccatgctttcggcagatgcttgaacctcttcaaaatcaaacagcacacgctgggcatctgcggttgtcagtgaggaaccgtctaacgttaccatcatttcaacccctttttctttactttggtaaagcgcccatacaaaaaggagctatgccatgaaaatgatatttcacgcatagccccctatcatctgatatctatgggctgattcatatgtgattaattccgactccgaatgtttcgtgctcaagccccttaatcggagctccgatcgtgccgtaaagggaaacggcgatccaatcgccttccgcctcgctttcatacggatttccccgcaagacggcaaacttcaggcccacggtacgaagcagcgagccaagcagcatttcgccccgcgtcactccgtgcaaagcttccattgtggcatgatacagcgcatgtgattcgcgataaccctcagattgaatgacgccgctctttttggaagcggtttcaattgcagctaccaccttatgcgcatccattgaacccaccctgccgagacagactttccagccgtcccgttccagccggctgatctgctggttttcttcagtctcatgaagcagaagaaggacggacaatcgcccgatgcggcggtctttgtgtaaggtcatatatgcttcactcaattcttaaatattctgataactagtaactgttttttatattaagtgtttgcgaatcagaagtcaaaactttttttccagtctttcacaaatcagattgctattgtattaaagcggtacatcgggaagccggcgctgttgatcacatatttccgccatccgcgtcataaaatagagcgttgtcttgaaagcgttttaagaaaagaagagagcgaggagatttcagaaaatgaaaaccagtttctttcgtgtgtgcctggtctcagcagcggttatcgggttcactctgccgcaggcaaaagcccagcatcccgttttttcagaggtcagcgtgcatgatccgtccgtcatcaaaacaggcgatacatactatgtattcggctcgcatttggcttccgccaagtcgaaaaacctgatgcagtggcagcaactgtcttcaagcgtcaatcccaataatcccctgatcccgaacgtctactccgaattaaaagagacattcgactgggcccagtctgatacgctgtgggcgccggatgtggctcagctggctgacgggaaatattacatgtactataacgcctgtaaaggagactcgccgcgatccgctctcggtgtcgccgtgagtgacaaaatcgaaggaccctacaaaaacaaaggcatctttttgaaatcaggcatggaaggaaaaagcgaagacggcacgacgtatcatgcaaacgttcacccgaacgtcgtagatccgcaaacgttttttgaccataaaggcaagctctggatggtgtacggctcttactccggggggatttttatactggaaatgaatccgaaaaccggtttcccgctcccgaaccaaggctacggaaaaaaactgctcggcggaaatcacagcagaatcgaaggcccgtacatcagctacaatccggaaacgaaatattactatctgtatctgtcattcggcggacttgacacagccggcggctacaatatgcgtgtggcgcgctctaaaaatccggacggtccgtactatgacgccgcaggccataacatgcttgacgccaaaggaaaagacggcagtttcttcgatgacaaagcaattgaaccgtacggggtcaaactcatgggcggctacagcttcgcctcacaatctgaaaaaggcacgggctacgtttcaccgggacacaactccgtgttttacgacgggaaaacgaaacgatcatacctcattttccacacccgtttcccgaacagaggcgaagagcacgaagtcagagtgcatcggctgtacatgaacaaagacggatggcccgttgcagcgccgtaccgctacgcaggagaaccggatacacacatatcggcagccgccgcatccggagcctacaaactcatccagcatggaaaagacattacagctacgatcaaaaccccaaaaaccatccggcttaacaacgacggcaccatttccggggaaatgaccggaacctggacaataacgaacagcagcaaagcccgaatcaacctgaacggcacacattatgacggtgtcttcctgaaagaatgggactcagcgagagagaaagaagttgtgacgtttagtgtgctgagcggtgatggggaggctgtttggggagtgaagtgaaaaagcacctactccagtttggagggtgcttttttcttgctaattaggagaatgaccttctattgcttttaataaaccatttgaattatgatggactcaacctctatcgtttacagtgaacagtataaaattgataacaaaaatatgaatacatacctaagaaaaaacgaaaggaagtttaattttgaaaaaaacaataaaagtagccgccgcagttatacaaaatgaaaacaatgaaattctatgtgctctacgttctccaacaatgtctcttcctaatctgtgggagtttcctggtggaaagcttgaagaaggggagaatgctcgggaagcacttgtaagagaaattgaagaggaacttgattgtaaaattgttacgggcgatgtgatagctgatattcatcatgaatatgagaaggtcatcgtcaatttaatttcaataaaagcgaggattgtatcagggaagccggtagcaaaagagcatgcggaattcagatgggtgcctattcgtgagctagaatcactagagtgggcacccgctgatcttccgaccgtatctgctttaattcgttaaatccacatacaagttttctgggacaggctgatggagcttccatttgacattcattggcttgtctccgtggcttgatacgtaatccgcttctcctaaataaataaatggtaaagtgatgttgtgcatttcagtgaatttcctcacaaataaatgaatatggtatcctttttccttatggtgaataaagttttgccctacgcttgatatatgtgaggtttggttttgactttgccagtgaaaatggctaggatcaataaaataatctttatatagcaaatgatcttctactttttctgacttattcaaattgataaagattaaatagtgatttttaactctacgtacaccctctcgccaagtcccttcctgatcagttgactgaaaaagataaatgagctcatttcttgtataggtctgatacaatgttagcttaatctcttttgaagcaagggcttctatattgttcatacgtctaaattcaatcagtccatagtggacgcgctccttaatatacggtccgaataatggatcggttaaaatctcgcttacttctggatctaacttgaatgtatcaccttgtaatgtaccaaagcgccaattctgtttttgatctgatttcgttaaacgctccattgctcgctgaatgaggtcatcatgtgtatctgttgtgatttgaatatgaaactgtttttctaacgattcttttacatcttctattgtgatgatatttttgtgaaaaccgctctgtaaaattaaccattcataaggccatttaataggtaattgctgttctaatcttgctactatccctacaaccaaggggttattgagaatcccttcatctgtaacattcaaatcgtccattttctttttggtctgtacccacgatttgtatttctttataaaaaaggtaagcccaggtgcctgttcagagtatagaaaatcaattaattctggagagcgccctagctcttgtttaaattgcttgtataacgttttcagcatggcatctgaatttagtttaatgtgatcgatcttatttaaaatttctttcttcgttatggctgaaaggtcaacataagatcctccaggtaaatctgaaaactcatgcgtcacggccactcggagggaatctttatcaaaagatttttggcttgtttgtccagatagtgcgagtggaataacgaatgacttttgatagtttccgataaaatccagtatcgttacaaactctttgtcgtcagtttttctaagtccccgtcctaattgctgaatgaaaatcgttggtgattccgttggtctaaggaacaatagtagattgagctttgggatatctattccttcgttgaaaatatctactgtaaatataagttctaaactgtggtgcgggtcctctaattgacgaatgacctcttgtctttttgcaggagaatcatttcctgttaaataagttgtataaaaacccaatttattaaattcatcactcatgtatattgcgtgttcgacgtttgtacagaaacctaagccaaccattttctcgccgtggaatccatacatgttgatcatcttgatgatatattctactcgtttatgcgtttttaaatgattgactagcgatttctcttcgtacagtccgtttttcacttttactttttcgtaatctacagtatgatctgaaattccaaaatagtgaaatggcgcaagtagctctgcctttagggcatcgcggagtctgagttcataaacaacattatgatcacaaatctgaagcacatctttaccgtcaagacgctctggtgttgcagttaaacctaataaaaactttggtgtaaagtagtttaatacagcttgataggtagatgcttctgcatgatggaattcatcaatcacaatgtagtcaaactcatctgttgaaaaagattccaaagtatcttttttatgtaacgtttgtatagtgctaaataaaaaacgcttatctctttcttttttcgtgccagtcaataagccaaaatcttcatgattatttgtgactttcttgaatgtttcgattgcttttgaaagtaactcttcccggtgggcaagaaaaagatatttatttggtttaaattgctcaaaatcaaatgctgctaaaaatgtttttccggttccagtggcggcgatgatgactgcttttgtctccccttcgtttcttgtttttttaaggtttcgtaatgcttccttttgcatggcattcggggacattttcgttttgtaaagagagttttgagcagcaaaggaagcacttaccttttggcttccagcttggaattcctcataggcttgtaaaaattgttcgtcaacaggctgtgtcttttcattccaaacagtgtcaaacaaatcttttgtttgttgataaacggggagatatctggtttcaggtagtctcacatttaactcatacccagtcgtaagggcagcttgtgatagatttgaagatcctacaatgacactatgctgtccagaacagcgttcaaataagtatgctttcgtatggaaagattttttatattcatttacaattctcaactcaacattttcaaattgaagaagatgtcttaacgccttcggttctgtaatacccatataggtagatgtaatgatgcgtacagggacatgtcttttagcaagctcctgaagcggagggatcaaaagctgaacaccagaccaccttgtgaaactaaccataaagtctacccgatccgccgttaacatttcgtgttttattgctttgaaaaagttctcatgagtttgatgatttcctagcagtttcagacgatgtagagaaaattcctctgaaataggaagttccatttcatttaaactataaagcactgtggaaagtggcaatgaaaaattcgtatgttttccaagctgagaggcgaccttctcgctcagctgaatcgcttgttcatattgatcttgatccacaagtgtttgaaatgtctcgctcagttgttttgccgtatgtaaagtcaaaacttctgcatattcttttgggctgaccggttgaatgcgatgtgatgttggataaagtttttgttgttgctgaatttcctcatggaagcctctatgatttctcatcataatctccttttttatatcaataattccattttatcactacttttaccaataggtaatactgaaaaagaagagaataaagtcctatttattaagcgcttaaaaaataacgctgaggtagtttggtttggtataaagacgtcatcgccacaaacggagaaagtctgtaagcgcaatgttccggagaaagccggcaaaattgacattcagcaaagagaggaggacaataaaagcagaaaggcgggattcatatgtttaaaaaaattcttgcagcagtagacggttcagacatgagcagcaaagctttggacgcagcgatccatctggcgaaagaacagcaggctgaactcaccattctttatgcgggacgtgaagccgttgtctccacatcagccttaacagggattgtctatgttccggaaaacttcattgaagacatcaaacatgaagtcgagcaaaaaggagcggccattctggaaaatgccaagcagaaagcggctgaaagcggggtaaacgcggaaagcctgtacgtccaaggcgaacctgcgcatcaaattttaaacatagcgaaagaacagcatttcaatctgattgtcgtcggaagccgcggaatcagcggatttaaagaaatgatgctcggaagcgtgagccataaggtctcacaattgtctccttgtcctgtactgatcgttcattaaacagaagaccctgctgatgcggggctttttttaatgagaaaagaccgccgtctttcgaaaaataggatgaaatcttcctctgaatcaagtaaaatggctgttagtatttgtctgaataaacagtcaatgatatgggggaagcaaatcaatgcaagctgaacaaacatcaaatgccgtcatcaaaatggtcatttccatggtcattttcggatcaatcggctttttctcggaacatacgaatgttccttcaattgaactggtctttgtgagatgtctgtgcgcctctttgtttctgggcgtttgctggtttggttccggacggcaccgcaccgaacaatggaaccggcgcgaggtgttgcagacattggcctgcggattttttctcgtgctgaactgggtgtttttatttaaatcgtttgaggagacatcagtgacgatagccatttccgtttatcatctggctccggttctcgtccttcttctagggagccttatataccgggagaaactgcatattgtgtccgtcacttccatcgtgatttgttttctgggcaccgccctgatttccggcatcaacggaaatacgtcattttctcagctgatgggatcgggtattatttgggccgtgctggccgcccttttttacgcctttacgacactggccgggaaaggtatcaacagtctcagcccatatgcggtcacctgtttgcagaccgggttgggcgttatcattcttctcccgttcgtccgtttcggcgctttttctgatttgtcgcatgtgaactggatcatgattgtgtcaaccggtatcattcatacgggaattgtgtatttgctcttttttgacagcttgcggtttttatccacccggtttatatcaatcatcgtatttcttgatccggcggtggcgattgtgcttgacaccgtatttacggggtttcgccccgacctttatcaatctttggggattgtgttgatttttgcgggaatggcactgtccctgattcgaaagcaaaaagccgtgccggcggaaactcaggcagacagcacccgtatataggcggccgtatcggctgctttttttgttttggggcttttcagccataacgaaaaagcagacaaacagatcatggaaaaagaggatagtaattgtataatacttcatgtgtttgcaatttaagagattaaaggagtgaagggcatgaaaaagaagacgcgtcatctcgctttcttggctgcactcggctttgcgctttgtctggccatcgtatgttccgcatccaagcaggcagaagcggcagcggcttatccggatgtgatgcagggacttaccggattcgctggcaatgcgaaggatcataacggaaaagcaaaatccgccgtatcgggaggccagggcggccccgtcgtctacgtcagcaatctcaatgatctgaaaaacaatgcgggcggaacggaccgcaaaaccatcgtcatcacaagtgatatttcttccccggggaaagccgttgtgacagtcggcgccaataaaaccatcgtcggctcttataccagccacaggctgaccaacatctatctgaccaccggctccggatcaaacaatgtgattttcaaaaatctcattatcagccataatgccgccattacaggcaacaacgacattccgatgtacatagcgaacgggcagaattactggattgaccacgtgtggtttgaaggacacagctacaatccgaacagccacagcgatttgggaaagcttctgtatgtcggcgccaaagcggattttgtgacgctgtctaactctaaattcacagaccatctgtacggcctgattctcggttatccgaatgatgataacgaaggacgcaattatatcggctatccgcatatgacgatcaccaacaactattttaataacgtctatgtgcgttcaccgggcctgatgagatacggctattttcacgcgaaaaacaactatgtgaccaatttcaatttaggattcaccattcatacaaacgcgactgtcttctcagaagccaactatttcggtaacggaaatgaaaaaggcggaatgatagacgactacgggaccgcccaattcaccgacaccggttcattcccgtcgctcaaagccccgaaatcaccgcgcaccggctggaatccgagatcaaattacagctacggcacgctttcagcccaggacgccaaaaacttcgcccaatcctacgcgggagcgcaaaatacaaatctccgctatccataatacaaaaaaccgccggcagccggcggtttttttatatgaataaaaggttcaaaattcctataatccttaaaataaccttaaatacctaggaaaatattgataaacaatttcaataatattactattgttaagcctatattacaaaagaaggaggagaacctatgaaaataggaaaaaagaacaagtggaaaaaatggctggccggcactcttgcggcaacgcttatgatttccattgcgcctgccgatgtatttgcggcagaaacgcgtgaaaaacaagatcaagcgaaaaccgccgccattccggcagcagacccggaaaaagatcttccggcggaaaaagcatccgagcagatgccgtttgatcaaaaagatatcaatcaagacggtgagatcacgtctgaaagaactgagaattcaaaactttattatgagggcgagggtgtatacaaacaggaaatctacacagaccccattcatacgaaagaaaccgccaatgcggactgggaagacatttctcctgaattgaaaaccggctcaaaggatgtcgggacggaaaatacagtgctgaactccgattttctgaagcaaatgaaaaacggattatacgctacatttgaacacggtgatcataagctcacatactcattaaccggcgcaaaaggccccgatcaggctgcaatcactccgacagatgcctcagcaaaagtgaaggaagacagcaacgagcttacgtatcagcaagtgtttcctgctattgatttacaaacctacacatttaacgaaaacataaaagaagaccttgtgcttcacaaatatgaaggctacaattccttcacctttcaaatcaaaaccgaccttcaggctaaagaacaggaagacggctcgatcgcgttttctgatgacaaagacaatgtcgtctacaccgtgccgaagccttttatgaccgactcagatctcgacgagaagtcaggtgaggtcagcaggtcagaagatgtcagcttcaagcttgaaaaaaacagcgaaggctacttgctgcatgtaacggccgatgaaaaatggctgaaagatcccaagcgggtttatccggtatctattgatccttccacatcagtatccgtgtcatccgatacctttgtcatgagtgcgtacccgacgacaaactactctgccgcgtcgcagaaatgggaggccggattgaaagcgtacgtgctgaaaacaggttattatgacggcacaaccggaacgaactacgcatttatgaagtttgataatctaaagccgatcaaaaacatgacggtgacaaaagcgacgcttaaagcatacacagcccactcctattacggatcaaaggcgacggggctttggctcgacaccgtaaacagcaattacgacaatgccaagatcacgtggaaaaacaagccgggctccaaaaacatcggcaaagccgaggtctataaaggccaatgggcaagcttcgatgtcacatccgcagtcaagtcgtggaacagcggcggcgccaattacggctttaagcttcacacaaacggcaacggaaaagaatattggaagaagctgatgtcatcagcaaactctgctaaaaaaccatacattgaagtgacatacacgattccgaaggcggacacgccgtctgtcaaagcgtatcataacggagattcgacaggacttttcaatatcagctggaaaaaagctgaaggcgccaaaagctataaagtgtggctttataacgggaaagaatatcaagccatttctgtcggcaatgcaacctcttggagcacaaaaggaaaaaacatctggccgacaaaagcagaaatcgactccggcaaatataagctgcatacagacggaaaaggcggaagtgaattagcgcttaatccttcgccggtctataaaaactccggcggcagctatccggcaagtaaaaattactgggtcgcggtcagcgcggtgtttgaccagggagaaggcgccatgtctgcggccgccaagcccgtcattccgaatattggcagagttcagaaaccaagcacgaaaggctttaataacaacaacgccacaggctggtttgatctttcctggaaagccgtatcaggcgcagccgggtataaaatgcaagtctttaacggcaaaagctttgaaacgcttgacctcggaaataaaacatcctggtccacaaaaaatcaaaacatctggccgacaaaggcggaaatcagcgccggaaaatatgcgcttcacctgaaagacaaaaaaggcgcggaattgccgatcaacccgggccccgtttataaaaatgccggcggagacgcaaaccggaaaacatacggatttaaagtaatcgcctataacaaagacggagaagcgatcgcctcaccggaagctagtccggcgctgcctgatatcgcaaagccgaaaaatctgacaggctacgtctatacgaacacgaaatcgagccaaacgggttatgtcaatctcatatgggataaagtcaaaaacgccaaaggctacaaaatcaacatctacaacggaaaagactatcaatcattcgatgtcggggataccgatcattggacgacccaaaacaaacacatctggccgtcagccgatgaagtgaaagcgggaaaattccagcttcacacggacggaaagggcggcgaactggcgcttgacccttcacctgtttacgaaaacgcaaacggcaattacaaagggaagaagaactattcctttacgctgaccgcctatgacgcaaatggtgacagtataccgacggcaccttttaaccctgttttccatgaaggtgcggaattcctcggaacggaagaattctggtctattatcgacattccggacggacagctgaacggcgcgacgggaaatgtcatcgtcaatgaagaagatatgtcaatcgacggacgcgggccggggctcggactctcccggacctttaacagccttgacagctctgaccatatgttcggccaaggctggtatgccgatgcggaaatgtcgattctttctgaagacggcagagccgtttatattgatgaggacgcgacaacacatgtcttcacgaaaaaatctgacggcacgtatcagccgccgacgggtgtttatctcgaactgacagaaacaagcgaccaatttgtattaaaaacaaaggatcagacgaacgcttatttcagcaaaaaaggcggcaagcttcaaaaagtcgttgacggacacaacaacacaaccgtatacgaatataacgacagcaatcagctgaccgccataacagacgcatcagggcgcaagctgacatttacctatgatgaaaacggccatgtcacatctcttacagggccgaaaaacaaaaagatttcgtattcatatgacaaagaccttctcaaaaaggtgacggatactgacggcagcgtcacaagctacgactatgatgccgaagggcgcctcgtcaagcagtattccgcaaacagcacggatgacaaaccgctgttcactgaataccaatacagcgggcaccgcctggccaaagccgttaatgcgaaaaaagaaacgtatgattacagctatgacgccggcaaaaaaacgctgctcatgacgcagccgaacggccgcaaagtgcagtacggctataacgaggcgggcaacccgattcagatgatcgatgatgccgaagggctgaaaatcacgaccaacactgtatacgaaggcaacaacgtcattcaggacaccgatccgaacgacgcggatgcgggcaaagcgacagaaagctatcaatatgataaagacggcaacgtcacagccgtaaaagacaactacggcaccgaaacgtatcagtacaacaaaaacaatgacgtaacgaaaatgaaggataccgaggggaacgtcactgatattgcgtacgacggacttgatgctgtttctgagacggatcaaagcggaaaatcctcatccgccgccgtgtatgacaagtatggaaatctcattcaatcaagcaaagagctggcagcttcggcaagcctgctgaaagacggcagctttgaagcaacaaagctgggctggaatctcaccgctacgagagacagcggaagcatcgcgtctgtaaaagcaagaagcggcgcgctgtccggacaaaaagcactggagatcacctcacaatccgcttcagccggaacagagcacggccatgcgtccgcaacgcaggaagtgcagcttgagccgaatacgacgtatacactcagcggccagatcaaaacggatctgacaaaggcgagagcgtatttcaacattgatctgcgtgacaaagaccaaaaacgcattcaatggattcacaatgaatcaggcgcattagccggaaagaatgactggacgaaacggcagattacctttacaacaccggccaatgcaggaaaagccatcgtctatatggaagtggatcataaagacaaggacggcaaaggaaaagcgtggtttgatcaggttcagctggaaaaaggcgaagtctcttcaagctataacccggttcaaaacagcagtttcacggctaaagcagatggctggagcacaagcggagccgccgctgaccttgatgaaggcttcgatgatgacagctcattaaaagcgtcccgcacaaatgcatcacaagccaatgcggccgcaaaacaaaccgtcacattaggccaaagcgcggacgataagccggtatatatcacgctgacagggatgtccaaggcagacggcgtaaaattaacgaacgacaatgattacgcgcttcaggccggcgtcacctatgcggacggcacgacgggcgtctacaccgccaaattcccgcaggggacacaggaatggaaccgggcggcggcagtcattccgaaaacaaagccgatcaataaaatcgaaatcagcattctgttccaaaaaagcgccacaggaacggcgtggtttgatgacatccgattaatcgaaggaagcatcctgacgaaaaacacctatgacgaaaaaggaaactacgtcacaaaagaagaagacgaactaggttatgcaagcactgcttcatatgacgagactggcaagaaaatgtctgaaaccgacgcgaaaggcgaaacaaccgcctacgaatacgatcaggccgaccagctgacaaagctgaccctgtcaaacggcacatccatccttcacagctatgacaaggaaggaaatgagctgacaaaaacgattcgggccggcgcaaaccagacctatcaatatgaatatgacgtcatgggcaagctcgtcaaaacaaccgacccgctcggcaatgtactgaagagtgaatatgacgccaacagcaacctgacgaaaaccgtttccgccaacggcaatgaagtgtcgctgacctatgacggcaccgaccgggttaagtcaaaagcgtataacggcactgaaaaatacaactttacctatgacaaaaacggcaatgaaacgtcggtcacaaacaaagaacaaaatacaacgaaaaaacgcacctttgacaacaaaaaccgcctgaccgaattaaccgaccgcggcggcagccaaagctggacgtatccggctgattcagataagctgaaaactttctcatggagccacggcggccaaaaaggaacaaacagctttacgtacaacaaacttgatcaaatgattgaaatgaaagacggcacttcagcctatacatttgattatgatgaaaacggcaatgtccagacattcatcagcggaaatgaagtcggcacgagcttctcatatgatgagcggaatcttgtcagctctcttcatatcggagcgaaaaacggcggcagcatcttccgggaaagctatgaatacgacgccaacggcaaccgcacggtcatcgacagctcagccggcggaaaggtgcagtacgaatacggcaagctcaaccagctcgtcaaagaaactcatgaagacggcaccgtcattcaatatacgtacgacggcttcggcaaccggacaaacgtcaccaccacaaaggacggcgcaagcaaatcagtcaacgcatcattcaatatcatgaaccagctgacgaaggtgaatgacgaagacctgtcctatgataaaaacggcaaccgcatatctgacggcaaatacacatatacgtgggacgcggaagacaacctgaccgccgtcacgaaaaaaggcgaagacaagccgttcgcaacatacaaatacgatgaaaaaggaaacagaatccaaaaaaccgtcaacggaaacgttacgaactacttctatgacggagacagcttgaacgttctgtatgaaacagacgccgacaacaacgtcacaaaatcatatacgtacggtgacagcggccagctgttatcctatacagagaacggcaagaaatatttctatcactacaacgcacacggcgacgtcatcgccatctcagacagcaccggaaaaaccgttgccaaatatcagtacgatgcgtggggaaatccgacaaaaaccgaagcaagcgacgaagtaaaagacaaccgctaccgctacgcaggctaccaatacgacgaagaaaccggcctgtactatctcatggcccgctactacgaaccaagaaacggtgtattcttatcactagacccagacccgggcagcgatggggattctttagatcagaatggatatgcatacggaaacaacaacccggtgatgaatgttgatccagatgggcattgggtgtggctagccattaacgccggctttgcggcttatgacggatataaggcatataaatcaggtaaaggatggagaggtgcagcctgggcagcggcttcgaactttggtcctgggaagttatttaagggtgctaatcggatttataaagctgctaaaacatataaactatctagaaaaagtgtacgggctagaagggcctactcaagttatagggatataactggaaaaacttctaggttcaaaaattattctactaatgtaaaaagaagaacttttgaaaaaaatttaagaagacaaggatggagaaaatcagttcatcatgggggtgttatcactatgacgaaaaatgggaataagtattccctaaggaaacatgctaagtcaagtccctatccaaccgcggaatatacacctaaaggtagaaaaaaattcacacacaaaatcagaatgcgacattaaaggggaaataagatggatcactattttattgatcatcctaaggagttaaaagtctatcaatccataattaattccttatgtcacgtagatcaaacattgcctaaacaagtttttaagcaaaggaaaaattattatttattcgaggaattccattgggtattatctgaagaaagttggggaatgtttaagagtttggctaatgaacatcatgatgagtttatattaatggctgttatagacagttctgaacatataaaccaattctacgaagaatttgagtattttaactggataaagatccctttgcatataactgcagatgagtatctgtcactcttaactgattatccaaagcacagtaaaagtgactgtataatgaatattgcatctcgtgttgtttgggcttcaccgactttaaagtgggcgatttatggtgagagagaacttgaaatctgtattctaggtattgatcatcagagtgaaggaaaagaactagcaacttggagatcgttagatggcgttgtcttagattggatatcagttgtattcccaaatcagacggttccagttgaatttgaaaaaacacttacggcacattacaaataagtatatttttaatacctactaccgatatcatctgattgttctaaacgggatttcaaataatctccagatagtatttttgcattcaacagatatttaatgacaaatatgcagagtaatatatttttggggcttgtttgaataatctatgtttatcatcaagacacttctatcaatgggtttgttagtgttagttaggagaaggagaagacaatgcacaaacaaattgaacaatagagtagattatattgacgagggatgtaatattttaaaggtcgattatcagttctttaaaaaagacctgttttaaggttcaggttgttaaaaatgcagcatctgtttattttagtgcagatattggtgatatgagattagaaaaaatagattcggaagaatacaattggcaagtatttgagatgagttaccacccggaaggaatcggtaatctatcaaatgctgtaattccggagtatcaatcaaatgctaattttctcattgacatgaacagaatgctgattgctgtagaagctgaaacagttcgctttgacgaccaatcattttatgcgtatcatccgaaatcataaataaacaaataagagaggttcccagcctctcttttcttacataacgaaatcgttcgcggaggcaaacatgaacactcctttaaatttacaaaaagaatcattgagggctatagggaatctggatgtgattaatccgcttaaatacaattcgatttattcatgtgatctagtgagtaaagatactttttctcaaattaatgaatgacttagagttcgaaacagctctaatagaagtaatggcattcccttcttttattgaagaatggaagaagaaggttgaaaagaaaatgataaatatgaatactgtatcgaaaaagttcattcatattgaatgtgtcctaaccaaagaagaattgatggcagattacttattagatgaattatattttttagcatcgatcaatgattttgttgttataatagcaaaccctgccaaaaataagtcctgcatgaacctgaacactcaaaaggttgatgtaactactgaaagtaatgaaaaaatcatttggtttgaatacgatgcagcagatttatatatcattgattaatttaatataaatttcaggttcctattcaacggagtgttgctgatgttaaaacttaccgcggagcgtgttgggtcatatgaaagggaaaatatcatttatttcaatgcgggtcgggatgatcaagtatttattgtgtcggtgcacgatcacaaagtaatattggaggttatgaaaggcagctctcttttaatcaaaaaagagttacacggattttctgaagatgcccatttctatctgattgattcgtatgatgacactatcgtgatcgtttacctggagaatcatacgtgtcaattggctgcatactgcgtaaacagtaataaaatcaatccgatttgttcttttctattaagcgccaatgtatttcatctgggtgaggatggattattatggatcggattaacggacgagggtatgtatgatgagagaaatcctcaaggaaaagcgatatttgcttttcatgcagaagacagaacgttttattttgaagacgattttaaagaaatgatgcacgaatgctatgccgtacaatcgatcaaatctgatttgtatgtatgtttcgagggagaggattgctgtgtcatcgggcattatcagattggacgggacagaattcgtactgttgcagaatatgtgctggacggcgatcaatactcctattgtgatcagctatccgtttcgaaaaaaagggtgctgctgattcagagtcacgatgataccctatttgcatttcatgaagagcacaaagagactgacgtcatgatacacggtattgatagaaaaggagaaacaacgtacagagccgtacaggatcgcatgtttatctttagtgataacgatttatatctggtaaagtattgatcaatcctatgcagatggctttttacagccatctgcatatcattttacggagtgaacgatcgatataaataggataccatccaagactcaaggggcaatgacatgaaaataaaaatgaataagatagtcgaagaatcagtaaaaggatgtttttgtcattttgataactgcgggcgtctgtatctcggacggcatcagaatggcgggctttcgtttacgatcatcgacaaatcgggcgatacgcgagtgattcatatcgatgaacaaatcccgtatgaggatattatgctgttccaacagagttcggctgactggtatgtgttgattttctttgaatcgcatgagtataaagtgaaagtattttcagcagaaggaacagaacaaagtgcattttctctcccttcaggggtttcatgcagtcttttggatgaaaaacaaaacctgtggatcggtttaagtgatgaaggtatttatagtgatgaaaatcctgaagggcacagtgtgctgtgcttcactttagacgggcagctaaagaaaacccacattgatcagcagctttcagaaatatatgcgcccgcggtagatgactgttatgcacttgcagaaaaagacggactaatctacatgctgtattacgcttatacagtcattgctgcgtttgaagaaaccgacgtgaaacgagtgtggattatttctgataaagcatattccggggtttacgaccagctagcgatttcagataacgggttttgggtatgcaaagatgatcattcactgtctctcattccggccgatgtcagtctgccgatgcaagagataacgtgctgtgatgcggatggcgatgagctttccgggcatcagctgaagctgactggcgatgccatttacgcggtctcgaattcagggatttataagcgggatatcagtaatgggaaagcggctaaatgagatgttaagatccaacagatattctttaaataatgacgtcatcagaagcttgaaattacacaaaaaagaattagaggggccgctgccttcagatgcagggagattcgaagaagactttgagggtgctgcctgcgctggggatttttatgaatacttcgcacttgtctgcggcagcttagattttgttttggcgaataaacaaatgcctgcacggcagcgtaaagccttatataaatccttttttgagctgtatccgcaatatgcgcagctgaaaaacgctttgatggattatccggagctcagccaggaaatcgggcggcacgaacgggccaggaggctgttagtcagcattttaaacaagaaatgaaaggcaggattttgacgtgaaagaacccacaagagcagaatgtctgaaaaaggctggtctgatcctgaacggtcaagcggcgagggaagaagtgtcggattgggcgtctgagtatgtgagtgcaggtgatccggcggatgaggacgaaaccgtttgggagatgctcgtatatttgagcgggtttgatctgaaagattcgcctgatgcgtatctgcatacgatagaagaattaagagattgggtgcaggaatataaagaagttcatggggatttgtaagaaaaaaattcatttgagtcagacatgtcaattcagctgaaaaaaaggaggcgcaaaatggaatggcacaaacatgagaaagcagttctgccggggccaggttcgccgggttgttttgaattgacggagtttacgttctataccgggtataacgagtattatgataaaatcccggtgtttgagctgaagctgactgacggacagtatgatgccgtgctgcggtttgaggatgtgaggtctgcccggctggatgatcttgaaagcatcaccgacatccatctggatatcagcccagtcgacggcggctgggaatcgatccgctactatgtcgatgacggggaaggaagtatgagcttttattgcgccaaatgggtcgtgctcgacatgaagaaaaagcagtcccccgaacggcccggcaaaacgtcagggtaaagcggcggcatttcgcgtataatgaggggagccggacagagaaggagtttagtcatgaatgagtttaatgaatatgcgatcagccccgagatccgacgggcgctgaatggcttgcaatacaccgagccgactgaagtgcagcggcgcgtcatccccgccgcgctgcaaaaaaaagacctcgtcgtcaaatcgcagacgggcagcggcaaaaccgcggctttcggcattccgatctgcgagcttgcggagtgggaggaaaacaaaccgcaggccctgattttaacgccgacccgcgagcttgcggcgcagattaaagaagatatcacgaatatcggccgtttcaaacggataaaagccacggcggttttcggaaaagcttcttttgacaaacagaaaaccgaactgaagcaaaaaagccacgtcgttgccggaacgccgggacgtgtgcttgatcacatagaaaaagggacgctgccgcttgaacggctggcgtatgtggtgattgacgaagcggatgaaatgctgaatatgggatttattgaacaggtggaagccatcattcagcatctgccgaaaaacagagtcaccatgttgttttcagcgacgctgccggatgacgtcgagaagctgagccgcacatatatgaaagaccctgaattgattgaagtaaaagcggaaggcctgacgacaaaagacattgagcattttgtcaccagaacagaagaagaggataaatcatctttgctgcgtgatgtcctgatcaccgaaaacccggacagctgcatcatattctgccggacaaaagaaagggtcatccagttaaccgatgagctggacaggctgggctacccttgtgataaaattcacggcggcatggtgcaggaagaccgctttgacgtcatgaatgaattcaagcgcggcgagttccgctatctcattgcgaccgacgttgccgccagaggaattgatatcgaaaacatcagcctcgtcatcaattatgatattccgcttgaaaaagaaagctatgtgcaccgcacaggcagaacgggccgcgccggacaccgcggacgggccgttacgtttgtgacgccggctgaatcgcggtttctgaatgacattgagacatatatcggtttccgcatccaaaagcgggaggcgccgtccgagaaagaaacagcggaacggaaagcggcttttgcggaaaaattgaacgcccgccccgatgtcaaaacagacaaaagcgaacagttaaacaaagacatcatgaaactgtactttaacggcgggaaaaagaagaaactcagagcggtcgattttgtcgggacgatcgcgaaaatcgacggcgtttcagccgatgatatcgggattatcacgattctggacaacgcaacatacgtcgaaattctgaacggaaaaggcccgcacgttcttgacatcatgaaaaatacgacggtcaaaggcaaaaaactgaaagtccataaagccaagaaataaaatagaaagcctgccgcgtgcaggctttttttacgccgtttcctcaggcacaaacgcaaggatggcaatgccgatcacaaataacaaaatcaggctgaacacggcggctgacgaatttccggtcagctgggcggtgacggcaatcaaaagcgggccgataatcgaagcgaacttgccgaagatattataaaatccgaaaaactcattggcgttctgtttggggacaagctttgcaaagtaagagcggctcagcgcctgaatacctccttgggaagtggcgacaagcatagccaaaacccagaaatcaaaagcggaatccataaaataagcatacgtgcagacaatcatatacacgccgattccggcataaagcattgtttttcctttaaaccgttcggccagccgctcgtacaaaatcgaaaaaggggcggcgacgacctgtgtgacaaataaaacaatcagcagatttgccgcgctgatgccgaggtcagccccgtatgacgtggacattgtaatgatggtgccgaccccgtcgatatagaagaaataggcgagcagaaacaaaaacagcgcccggtgcttcctgatctgcttcagcgtgccggccagccgtataaaactgctgatcacaagccgcggctccctctcgatataatagcgctggcggacgcggagaaggagcggaatcgaaaacagtccccaccatgccgccgtaattaaaaaggcaatgcggcccgcagtctgggcggacagcggaatcacctccgcttgtgctgacagaatcacggcaatgctcaggagaaaagggattgtactgccgatatagcccagcccaaaccccctggcggacaccatattcatccgctcctttgcggccacatcaacgagaaacgcatcataaaacacattagatccggcaaagccgatcgtggaaatcgtataacaaattaataacagcatccaagattcgccgggaatcaaagccagcgcggcggtgcccgccacaccgatcagaaaaaagaaggcaaaaaaccgtttcttgcatcctttgtagtcggcaatcgttcctaagacggggctgagcatcgccaaaataaaagtcgcggcggcaatcgtatagcccaaataagcggtggaatcagctgcgctgacgccgttttccgccgccgccgctttaaaaaacaaggggaacaccgccgtcataataatgaccgaataagctgaattggcccaatcatacagcatccagctgctttcttctttcgaaaaccgtttcatcacacacgctccttcccaaaaaccggttctctgcattatatgcgcctctgcctcatcgttggacaatgatttctgaacggcgttttctgattgacctggagatattgacctggtacaaaaaggatgtacaatcaaggtgtagcaggtaaatggtcaggcgggagggagacggaattgaagattgcgaaagtcaataataataatgtcgtcagtgtgctcaaagaaggcaatcaggaattggtcatcatgggccggggcattgcttttcaaaagaaaacgggagatccggcagatgaagcccgcattgagaaagtgctcaccctcgataacaaagatgtatccgaagttcaaaacccttttgtatgatattccgatcgagtgtatgaaagtatccgaggagattatcagctatgcgaaattacagcttggcaaaaagctcaacgacagcatctatgtgtcgctgaccgaccatattactttgccattcagcgcaataagaaagggctggatatcaaaacgccttgctgtgggaaacgaagcggctctacaaagacgaatttgcaatcggaaaagaatcgctgatcatggtaaaaaacaagactggcgtgtctctgccggaggatgaagcaggttttattgcgctgcatattgtaaatgccgagctgaatgaggagatgcccaatatcatcagcattacaaaagtcatgcaagagattttgagtatcgtaaaataccattttaagattgaattcaacgaagaatcgcttcactattatcggtttgtcacccacttaaagtttttcgcgcagcgtctttttaacggcacacatcgactttttgctggagaaaaataccgtcgggcgtatgaatgcacgaagaaaatccaaacttgcattgagagggcgtatgagcacaagctcaccagtgacgagctgctgtatttaacgattcacatagaaagggtagtcaaacaagcataatgaaagcgttggcattattgttcttggattcattttttcttacattcacatatgatcttgttaggattgttgctgataagcatgcaaaacctaaattacaatgagcgcggatcatttctgtttgtgctgatggtaatttaggtttttttaagattcgttattatcattattctgaccgatgttcccttttaacagaatcatgtatgatcgataaagaaatcgctctcaaagaaaggggaatgccgacatgttttatcgtatgaaacgagtgctgctcattcttgtcactggattgtttttgagtttgtgtgcgatcacttctgctgcatcagctcaaacaggcggatcgttttttgaaccttttaacagctataactccggtttctggcaaaaagcaaatggttactccaatggagatatgttcaactgcacttggcgtgcaaataatgtatccgtgacgtcatcaggtgaaatgcgtttggcgctgacaagcccgtcttataacaagtttgactgcggggagaaccgctccgctcaaacctatggctatggactttatgaagtcagaatgaaaccggctaaaaacacggggatcgtttcatcgttcttcacttatacaggtccaacggatggtaccccttgggatgagattgatatcgaatttttaggaaaagacacgacaaaggttcaatttaattattatacaaatggcgcgggaaaccatgagaaggttgcggatctcggatttgacgcggccaatgcctatcatacgtatgcgttcgattggcagccgaactctataaaatggtatgtcgatgggcaattaaaacatactgcgacaagccaaatcccgacaacaccgggaaagatcatgatgaacttgtggaatgggataggtgtcgatgactggctcggttcctacaatggtgtaaatccgctatacgctcattatgactgggtgcgctatacaaaaaaataatgtacagaaaaggatttccgccagcggaaatccttttttaattaaaacgaaataatcccaatcaaaagcgccgcaatcgtcatcacaatcgttgttcccacggcccatttaatagtgaatttttgatggtcgccaaagctgacgcctgccattccgaccaatagataggtggatggcacaagcgggctgagcagatgcaccggctgtcccagcaaggaggctcttccgatttcagcggcgtctattccgtaagcggaagcggcttcggcgatgatgggaagaacaccgaagtaaaaggcgtcattcgacatgaaaaaggtgaaaggcatgctggcaatcgccgtgatcaacggcagatgcggacccatggcatcagggatgagggaaacgagagaatgcgccatcgcatcgaccatttttgtgcctgagagaatgcctgtaaatatgcctgccgcaaacaccattgagacaacgtttaacgcattacccgcatgcgccgaaatccgtttctgctgctctttgacatttggatagttaatcatcaaggcgatggcgaacgcgatcataaaaagaacagggatgggaagcaggctggtgatcagcgcggccatcagagcgacagtcagcagcaggttaaaccactggagagcgggacgcttcagcggcgccgcctccggatcagaagacggcgcgtgttcaatcgaaatgatgccgagacgcttccgttctttttttccaaggagataagcaacggcgatcacccagagaacgccggcgatcatagcgggaatcagcggcgtaaaaacttctgacgtgtccaatttcaaggaagccaaaaccctcgccgtcggtccgccccacggaataatattcatgacgcccgaaccgagcatcgcaatccccgccagcaccaaacggttcatgccgagccgtttgtaaaggggcagcattgccgcaatcgtaatcatatacgttgttgtcccatctccgtccagcgaaatggtcatcgtcagaaccgctgtgcctacggcgatttttaacgggtctcctttgacaaacgataagattttggcaatgagaggatcaaacaggcctgagtcgatcataatgccgaaatacaggatggcgaataacagcataatcccggtaggagcgaggtctgtaacaccctgaatcatcatcccgccgagatctttgccaaatccgctgatcagggcaaacacaacaggaacgacaatcaaagcaataagtgcggaaagccggttagacataataaggtacataaaaacaatcatcatcacaaaaccgagtatggcaagcatgatatgacctcccctgttcaacagctgttttggtaagcgctttcacattttgtttctgtgaaaatggcttatttcaaaatgtgtatgaccgcatatgtaaatacagacctaaaatcctaatgagcggatcagcagtttatttaaagaacgccgcgggtaaatgtgctgtagaatgtttcgttttaaaagggggaactgacatgagtgatgatcaaaacaaacgagtaaatgaacactcaaaggacgaacagctggagcagtaccgatctgataacagcggcaaaaaaatgacgaccaatcaggggcttcgcgtgtctgaggatgagcattccttaaaagcgggcgtccgcggccccacgctgatggaggattttcattttcgtgaaaaaatgacgcactttgaccacgagcggattccggaacgggttgttcatgcacgcgggtacggcgttcatgggcattttcaggtgtacgaaccgatgacggaatatacacgggcgaaatttttgcaggacccgtccgtcaaaacacctgttttcgtccgtttctcaacagtggcgggctccaaggggtcagctgacaccgtccgtgacgccaggggatttgcgacgaagttttatactgaagaagggaactatgacctcgtcggaaacaatattccggtgttcttcattcaggacgcgatcaaattcccggatctcgttcacgccataaaaccggaaccgcacaatgaaatgccgcaggctgcgacggctcatgatacgttctgggattttgtcgcaaacaatcctgaatccgcgcacatggtcatgtggacgatgtctgaccgcggcatccctcgaagctatcggatgatggagggcttcggcgtgcatacgttccgtttcgtcaacgagaaaggaaaagcgcgctttgttaaattccactggaaacccgtgctcggcgttcattccctcgtatgggatgaagcgcagaaaattgccgggaaagatcccgatttcaaccgccgcgacctatgggaaacgattgaaaacggcggcaaagtcgagtatgagctcggtgttcagatgattgacgaagaagatgaatttaaatttgatttcgatatccttgatccgacgaagctgtggccggaggagttggttcccgtcaagctgatcggaaaaatgaccctcgaccgcaatcaggacaatgtctttgcggaaacggaacaggtcgcctttcacccgggaaatgtcgtgccgggcattgatttcaccaatgatccgcttcttcaaggccggcttttctcttatacagatacacagctcatccgtcttggcgggccgaattttcacgagattccgatcaatcggccggtctgcccgttccataacaaccaatacgacggctaccaccggatgacgattaataagggccctgtcgcctatcataaaaattccctgcagaacaatgatccgtcgccggcctcagaagaagaaggcggatacgttcattaccaggaaaaagtagaaggcagaaaaatccgccagcgcagtgagagcttcaatgactatttttctcaggccaagatgttctggaacagcatgtctcccgccgagaaagaacatatcatctccgcgttctgttttgaagtcggaaaagtgaacagcaaggatgtgcagcagcaggtggttgatgtcttcagtcacgtcgacgccgggcttgccgagcgtgttgcgaaaggaatcggcgtgaacccgccgccgaaggaccgtgaatctgatgaaacgttcacttccccggccttaagccaggaaaacacggtgaagacggcagcgacaaggcaggttgcggttttaaccgaccacgggttttctgatgagaaagtcaaacaagtgcttgacgcatgcaaacaggcgggagtcagagccgatatcatcagtcctgtgcttggaaccgttaagggagaaaacggcacggagctcgaagcgtcagccacgttcctgacagcggattccgtcctgtacgacgctgttttcattccgggcggaaaacaaagcacagacagcctcaaagcccaaaaatcggccagagacttcgtcaacgaagctttcagccattacaaagcgatcggcgcctccggtgaaggaaaagaacttctcgccctcgccgccggaaccgaaagcggccccggtcttgttccggacggaaaccatgaacaatttctgaaagccgtggctgagcatcggcattgggacagaaacgtataagaatgaaaaagcgcctttgatgagaggggcgcttttttcttgtgaaagaatattgggagaaaacgaaaattgcttccgtacaaatccgtatcttccgctgtcctggacattcagacaacagttttagagagtcagggcatgcgctatttaaagcaggcgggttgatgaaataatagtttcaccctctttggtttacttccgccctgtgtttgtgtatcttaggggtagattttctggaggagcgattgatagtgaagccgtttaccgaaaaacaacttgaagaatattaccggcgtgacgaaaacatgatgattttggtgtttgcccaatggtgcgtcaatcatgaccttgatccgatggccatttacagcaaagcttaccccggacagcctttaaacgaagagctgcgaaaaacggctgaagagcttgtcgtgccgaaggaggaatcagaaccgattcctgatcaaaccgtcatcggcgttttggagatgttcggcaactccgatttggcggaagccgtttatgaagccattgcgcaaagaccttcacggtaaaagaggcgtggattatccatgtctctttttttcatggagaaaatgtgaaagaaggcccagaaacaatttgctgatctgcgctgtctatagagtgtaatccgttttcaaaaagggaacggtaatgaaaaggaggagttgtgatgaaaaaggcattcaaaatgatggcggccgtgctcttaaccgtgctgacagccgcgccgttcggaggtttcgcgccttcagccgaggccgcgcaaactgcaaagcccgtcgtcaaaagccagacgtataagcatgtaaagcagctgacgtaccccgaggtcacaaatacgggaaacgcatcttttgaaaagaaaatcaatcaggacttcaaacgctatattgaaaactcgtaccaagaatatgtaaaaaacaaaaaagacggtgaaaaacaaggctacaaagcggaataccaggcagatttcaaggtgaagtataatcaaggcggcaagctcagcattcagacggaaaactacagttacacaggcggcgcacacgggctgacagccgttcagacctttaattacgacctggccgcaaaaaaacgggtcacactcaatgatgtgctcaatacaaaaacgaaagccaacaaaacgagagactatctttacggctacatcaagaaacatgacgatctgtttgaccaggacgtcaaaaaacaagagatcatcctgaataacgaaagacctttcttctttacgaaaaacggcattgccgttgtgttggacaatatgatctcggaccatacgcggcaggaatccgggacgttttcgtgcctgcatccgtctatcaataaaaaaaagcgatatcactctaaaacggagcggtatcgctttttttattttaccagacaaacaatccgacaatcgccgcgctcaataaggaaacggcaattccgctgacaagcagcttccagacgttttttccgatgatggctgacttttcaccatcaagcagagattgataagatccgtagatcataccgatggtgctgaagtttgcgaatgatgtcaggaatgtcgtagccacggcaatcgtgtgcggcggaagtgatttcagctgccctttcagatcggccattgccacaaattcattcgtcgcgagcttgatgcccatcagctgtgcgacatacatcgcgtcatgtacgcctaatccgagaaggaaggcaaacggactgaagatgtatgagaaaatcttttgaatggtcaaaccgtgcatgaacagtccgagtacgccgtttaacgcagccgttaacgccacatatccgattaccatcgctaaaataacaatgaccatgttcatgccgacaagcatactgttagaaatcgtgggagaagaagtctttttctccgcttttgaaggaacgtaaataatatcatcctctttagaaacgtccacgggattcagcatattggcgattaaaagcgcgtttaagcaattcagcgggatagctgtaaacacataagtggacggaaccatcgtcaagtacgatccgatgatcgaaccgctgatgctgctcatgctcatcagcccgaatgtcagaagccgattgttgctgacggcggcaagctgctggcggatgacggctaaagcttccgtatttcctaaaaacatcatctggatggagaaaaagctctccagcttcggcagacgggatattttagaaatcagccagccgattttatcaatgagccacggcagaataccgaaatacgacagcatatcaaagaaggtcacgacgaagataatcgcagcaatgcgctgaagaaaaatcaaccgtcggattggccatgatagacggaaaagcgaacgcaattccttgactggcgcaggaaatcagccatgtaaagaacgcgccgatcttcccgatgacaaagccgccgacttttgtccctaacataaaccaagtaatcagaaactcaaagacgaggagcatgacaatcggacgccatttaatcttcttcttgttgggagaacataagaaaacaacagccatgacaacaatgagaccgacaatgttcaataaaaagtacatgtgagcaactcctataagggtattatggaaataaaaaaagctcttattcgtcacaaattcctgaaagccagaaagtgtgataaataagagccaaaagaaaagaatagactgagagcatcatatgcttttcactcgttcaaatttatgcaaactttcttgtagtctagtcttttacggcactaggtagaaacaatcagaccatattactgatcatatacaagaataacgatattacatgagatagcagtattttatcgtttcaatttttgaaaatcaacctttttagatattttcaaaataataaatttatattataaataaagaaaataaaggatgttcacaagtaa
